(19) United States
(12) Patent Application Publication
(10) Pub. No.: US 2024/0254485 A1
(43) Pub. Date: Aug. 1, 2024

(54) SIRNAS TARGETING SLC10A1 TRANSCRIPTS, COMPOSITIONS AND USES THEREOF

(71) Applicant: HemoShear Therapeutics, Inc., Charlottesville, VA (US)

(72) Inventors: Ryan Feaver, Charlottesville, VA (US); Brian Johns, Charlottesville, VA (US); Jennifer Marks, Charlottesville, VA (US); Emile Velthuisen, Charlottesville, VA (US); Maria Sol Collado, Charlottesville, VA (US); Robert Alan Figler, Charlottesville, VA (US)

(21) Appl. No.: 18/411,859

(22) Filed: Jan. 12, 2024

Related U.S. Application Data
(60) Provisional application No. 63/479,923, filed on Jan. 13, 2023.
(60) Provisional application No. 63/501,914, filed on May 12, 2023.
(60) Provisional application No. 63/592,893, filed on Oct. 24, 2023.

(51) Int. Cl. C12N 15/113; A61P 1/16; A61P 29/00

(52) U.S. Cl. CPC C12N 15/113; A61P 1/16; A61P 29/00; C12N 2310/14; C12N 2310/321; C12N 2310/322; C12N 2310/351

(57) ABSTRACT

The present invention relates to siRNA molecules targeting a SLC10A1 mRNA transcript and methods of using the siRNA compositions for treatment of a NTCP associated disorder.

### CROSS REFERENCE TO RELATED APPLICATIONS

[0001] The application claims the benefit of, and priority to U.S. Provisional Patent Application Ser. No. 63/479,923, filed on Jan. 13, 2023; U.S. Provisional Patent Application Ser. No. 63/501,914, filed on May 12, 2023; and U.S. Provisional Patent Application Ser. No. 63/592,893, filed on Oct. 24, 2023; the contents of the above referenced patent applications are incorporated herein by reference in their entireties.

### CROSS REFERENCE TO SEQUENCE LISTING

[0002] The present application is being filed with an electronically filed Sequence Listing in XML format. The sequence listing file entitled “HEM_002 US1_SL_xml” was created on Jan. 12, 2024, and is 9,905,404 bytes in size; the information in electronic format of the Sequence Listing is incorporated herein by reference in its entirety.

### BACKGROUND

[0003] Cholestatic disorders are associated with high rates of morbidity and mortality, and are the leading cause for pediatric liver transplant. Cholestatic disorders include progressive intrahepatic familial cholestasis (PFIC), Alagille syndrome (ALGS), biliary atresia (BA), primary biliary cholangitis (PBC), primary sclerosing cholangitis (PSC), intrahepatic cholestasis of pregnancy (ICP), ductal plate abnormalities, Caroli syndrome, congenital hepatic fibrosis, and bile acid synthesis defects. Treatment of these conditions typically involves supportive care for complications from these disorders, including treatment for malnutrition, pruritis, and hypertension. There are limited effective interventions to prevent progressive liver damage in these diseases.

[0004] Hepatitis D is a liver disease resulting from co-infection or superinfection with the hepatitis D virus (HDV) with hepatitis B virus (HBV). The disease pathology resulting from a HDV and HBV infection can be extremely serious leading to severe complications and a greater likelihood rapid progression to cirrhosis and liver cancer. There are limited effective interventions available for the treatment of these infections resulting in significant unmet medical need.

[0005] Sodium taurocholate co-transporting polypeptide (NTCP) is a sodium-dependent uptake transporter residing in the basolateral membrane of hepatocytes and is involved in the hepatic uptake of bile acid from blood. In addition to its transport function, NTCP is also an important entry receptor for hepatitis virus B (HBV) and HDV. The roles of NTCP make it a potential target for treating a cholestatic disorder, Hepatitis B and/or Hepatitis D in a patient. The present invention discloses that silencing and/or downregulation of expression of the gene encoding NTCP, SLC10A1, in the liver can reduce and/or inhibit NTCP mediated activities, thereby treating a liver disease, e.g., a cholestatic disorder, hepatitis B, hepatitis D, Steatotic Liver Diseases (SLD) (i.e., MAFLD (Metabolic Fatty Liver Disease) (also known as NAFLD), MASH (also known as NASH), MetALD, ALD, specific etiology SLD, and cryptogenic SLD). siRNAs specifically targeting a SLC10A1 transcript are disclosed in the present invention.

### SUMMARY

[0006] The present invention provides, among other things, siRNA molecules that specifically target a human SLC10A1 mRNA transcript for repressing the expression of a SLC10A1 transcript, therefore reducing NTCP functions in cells, particularly in hepatocytes. The siRNA molecules are specifically modified to increase its targeting efficacy and stability in vivo. The siRNA molecules of the present invention provides advanced agents for treating a NTCP associated disorder, such as a cholestatic disorder, hepatitis B and D infection and non-alcoholic fatty liver disorder.

[0007] In one aspect of the present invention, a siRNA molecule targeting a SLC10A1 mRNA transcript comprises a double-stranded region (i.e., a duplex) of 17- to 30-base pairs in length that is formed between the complementary base pairs of a sense strand sequence and an antisense strand sequence, wherein the siRNA comprises a sense strand sequence selected from the group consisting of SEQ ID NOs: 1-15 and 481-611, or an antisense strand sequence selected from the group consisting of SEQ ID NOs: 16-30 and 612-742.

[0008] In some embodiments, the double stranded region of the siRNA is 17 base pairs, 18 base pairs, 19 base pairs, 20 base pairs, 21 base pairs, 22 base pairs, 23 base pairs, 24 base pairs, or 25 base pairs in length.

[0009] In one embodiment, the double stranded region of the siRNA is 19 base pairs in length. In another embodiment, the double stranded region of the siRNA is 21 base pairs in length.

[0010] In some embodiments, the siRNA molecule comprises at least one overhang, each overhang having up to six or fewer nucleotides, e.g., 5, 4, 3, 2, or 1 nucleotides. In some examples, the siRNA has one overhang having 2 nucleotides. In other embodiments, the siRNA is blunt-ended.

[0011] In some embodiments, the siRNA molecule targets a SLC10A1 mRNA transcript from human, rhesus monkey, cynomolgus monkey, dog, pig, mouse and/or rat. In some embodiments, the siRNA molecule targets a human SLC10A1 mRNA transcript.

[0012] In some embodiments, the siRNA comprises a pair of sense and antisense strand sequences selected from the group consisting of the pairs of SEQ ID NO: 1 and SEQ ID NO: 16, SEQ ID NO: 2 and SEQ ID NO: 17, SEQ ID NO: 3 and SEQ ID NO: 18, SEQ ID NO: 4 and SEQ ID NO: 19, SEQ ID NO: 5 and SEQ ID NO: 20, SEQ ID NO: 6 and SEQ ID NO: 21, SEQ ID NO: 7 and SEQ ID NO: 22, SEQ ID NO: 8 and SEQ ID NO: 23, SEQ ID NO: 9 and SEQ ID NO: 24, SEQ ID NO: 10 and SEQ ID NO: 25, SEQ ID NO: 11 and SEQ ID NO: 26, SEQ ID NO: 12 and SEQ ID NO: 27, SEQ ID NO: 13 and SEQ ID NO: 28, SEQ ID NO: 14 and SEQ ID NO: 29, and SEQ ID NO: 15 and SEQ ID NO: 30.

[0013] In some embodiments, the sequence of the siRNA molecule is 100% complementary to a portion of the sequence of the SLC10A1 mRNA transcript, e.g., a human SLC10A1 mRNA transcript. In some embodiments, the sequence of the siRNA molecule has a mismatch of 4 base pairs or fewer to the sequence of the SLC10A1 mRNA transcript, or a mismatch of 3 base pairs or fewer to the sequence of the SLC10A1 mRNA transcript, or a mismatch of 2 base pairs to the sequence of the SLC10A1 mRNA transcript, or a mismatch of 1 base pairs to the sequence of the SLC10A1 mRNA transcript.

[0014] In some embodiments, the sense and/or antisense sequence of the siRNA is modified, for example the first nucleotide of the antisense strand is modified to be Uracil and/or the last nucleotide of the sense strand is modified to be Adenine. For example, the siRNA may comprise the sense strand sequence selected from the group consisting to SEQ ID NOs: 31-45. In some cases, the siRNA may comprise the antisense strand sequence selected from the group consisting to SEQ ID NOs: 46-60.

[0015] In some embodiments, the siRNA comprises a pair of sense and antisense strand sequences selected from the group consisting of the pairs of SEQ ID NO: 31 and SEQ ID NO: 46, SEQ ID NO: 32 and SEQ ID NO: 47, SEQ ID NO: 33 and SEQ ID NO: 48, SEQ ID NO: 34 and SEQ ID NO: 49, SEQ ID NO: 35 and SEQ ID NO: 50, SEQ ID NO: 36 and SEQ ID NO: 51, SEQ ID NO: 37 and SEQ ID NO: 52, SEQ ID NO: 38 and SEQ ID NO: 53, SEQ ID NO: 39 and SEQ ID NO: 54, SEQ ID NO: 40 and SEQ ID NO: 55, SEQ ID NO: 41 and SEQ ID NO: 56, SEQ ID NO: 42 and SEQ ID NO: 57, SEQ ID NO: 43 and SEQ ID NO: 58, SEQ ID NO: 44 and SEQ ID NO: 59, and SEQ ID NO: 45 and SEQ ID NO: 60.

[0016] In some embodiments, the siRNA comprises one or more chemical modifications, e.g., 2′-O-methyl modification, 2′-fluoro modification, introduction of phosphorothioate modified nucleotides, substitution of uracil with 5-Propynyluracil, substitution of uracil with 5′-methyluridine, substitution of uracyl ribose nucleotides with 4′-thioribose and substitution of uracyl ribose nucleotides with deoxythymidine nucleotides and combinations thereof. In some embodiments, the siRNA comprises combined modifications of 2′-fluoro, 2′-OMe, phosphorothioate and terminal vinyl-phosphonate 2′-OMe modifications.

[0017] In some embodiments, the siRNA further comprises one or more N-Acetylgalactosamine (GalNAc) moiety, or derivative thereof. In some embodiments, the GalNAc moiety is conjugated to a terminus of the siRNA molecule. In some examples, the GalNAc moiety is conjugated to the terminus of the sense strand, e.g., the 3′ end of the sense strand of the siRNA.

[0018] In some embodiments, the siRNA targeting a SLC10A1 mRNA transcript does not comprise the GalNAc moiety.

[0019] In some embodiments, the siRNA comprises a specific modification pattern.

[0020] In some embodiments, the siRNA comprises a modified sense strand sequence selected from the group consisting of SEQ ID NOs: 61-270, or a modified antisense strand sequence selected from the group consisting of SEQ ID NOs: 271-480. As non-limiting examples, the siRNA may comprise a pair of the modified sense and antisense strand sequences in Table 3.

[0021] In addition, the present invention provides a siRNA molecule comprising a sense strand having a sequence of any one of SEQ ID NOs: 481-611, or an antisense strand having a sequence of any one of SEQ ID NOs: 612-742. As non-limiting examples, the siRNA may comprise a pair of sense and antisense strand sequences in Table 4.

[0022] In some embodiments, the siRNA molecule comprises a modified sense strand having a sequence of any one of SEQ ID NOs: 743-873. In some embodiments, the siRNA molecule comprises a modified antisense strand having a sequence of any one of SEQ ID NOs: 874-1004. As non-limiting examples, the siRNA may comprise a pair of sense and antisense strand sequences in Table 5.

[0023] In another aspect, the present invention provides a pharmaceutical composition comprising one or more siRNA molecules described herein, and a pharmaceutically acceptable excipient or carrier. The composition may be formulated specifically for any administration routes. In some embodiments, the composition may comprise two or more siRNA molecules having different pairs of sense and antisense strands described in the present disclosure, for example, two siRNA molecules targeting different parts of the human SLC10A1 mRNA transcript, e.g., the 5′ non-coding sequence, coding sequence and/or the 3′ non-coding sequence.

[0024] In some embodiments, the siRNA molecule described herein, and the composition thereof may be of use for manufacture of a medication for treating a NTCP associated disorder, such as cholestatic disorder, hepatitis B, hepatitis D, MAFLD, MASH, or MetALD.

[0025] In some embodiments, the siRNA molecule described herein, and the composition thereof may be of use for manufacture of a medication for treating cholestasis caused by another disease or procedure, such as cholestasis after liver transplantation or cholestasis from a malignant biliary obstruction.

[0026] In some embodiments, the siRNA molecule described herein, and the composition thereof may be of use for manufacture of a medication for diabetes, obesity, dyslipidemia, inflammatory bowel disease, or constipation.

[0027] In another aspect of the present disclosure, provided also includes a method of treating a cholestatic disorder in a patient in need; the method comprises administering to the patient the siRNA molecule described herein, or the composition thereof. The cholestatic disorder may be progressive intrahepatic familial cholestasis (PFIC), Alagille syndrome (ALGS), biliary atresia (BA), primary biliary cholangitis (PBC), primary sclerosing cholangitis (PSC), and intrahepatic cholestasis of pregnancy (ICP). In some embodiments, cholestasis may be caused by another disease or procedure, such as cholestasis after liver transplantation or cholestasis from a malignant biliary obstruction. In some embodiments, the patient is a pediatric patient. In some embodiments, the patient is an adult.

[0028] Treatment with the siRNA molecule described herein, or the composition thereof may reduce intrahepatic accumulation of bile acids in the treated patient. The bile acid accumulation may be reduced about 10%, 15%, 20%, 25%, 30%, 35%, 40%, 45%, 50%, 55%, 60%, 65%, 70%, 75%, 80%, 85%, 90%, 95% or 100% as compared to the concentration of bile acid before the treatment. The reduction may be due to the impaired NTCP mediated bile acid uptake.

[0029] In accordance, after treating, the patient experiences an improvement in at least one symptom of a cholestatic disorder, selected from the group consisting of pruritis, mitochondrial damage and inflammation in the liver, liver function tests, and hepatic injury.

[0030] In another aspect of the present disclosure, provided also includes a method of treating hepatitis B and/or hepatitis D in a patient in need; the method comprises administering to the patient the siRNA molecule described herein, or the composition thereof. In some embodiments, the patient is tested as hepatitis B or D antigen positive. In some embodiments, the patient is tested as hepatitis B or D antigen negative.

[0031] In another aspect of the present disclosure, provided also includes a method of curing hepatitis B and/or hepatitis D in a patient in need; the method comprises administering to the patient the siRNA molecule described herein, or the composition thereof. In some embodiments, the patient is tested as hepatitis B or D antigen positive. In some embodiments, the patient is tested as hepatitis B or D antigen negative.

[0032] In some embodiments, the siRNA described herein or the composition thereof is used as a monotherapy or in a regimen combination with one or more antiviral agents. The antiviral agents may include but are not limited to interferons, nucleoside and nucleotide analogs that interfere with DNA polymerases, siRNA drugs that target part of the viral genome, viral entry inhibitors, viral capsid or core inhibitors, S-antigen inhibitors, antisense molecules that target the viral mRNA, gene editing agents, therapeutic vaccines, monoclonal antibodies that neutralize HBV or HDV proteins, and prenylation inhibitors.

[0033] In another embodiment, the siRNA described herein or the composition thereof is used optionally with additional antiviral agents in combination with immunomodulators. The immunomodulatory agents include but are not limited to therapeutic vaccines, monoclonal antibodies that neutralize HBV proteins with or without FC domain signaling capabilities, check point inhibitors, immune system adjuvants and modulatory agents including potentially cell therapies.

[0034] In some embodiments, the siRNA molecule described herein, and the composition thereof may be of use for manufacture of a medication for cancer. In embodiments, hepatocellular carcinoma (HCC) is caused by hepatitis (e.g., hepatitis B such as chronic hepatitis B or hepatitis D such as chronic hepatitis D). In accordance, the present invention also provides a method for treating a cancer caused by hepatitis in a subject in need; the method comprises administering to the subject in need an effective amount of the siRNA described herein, alone or in combination with another anti-cancer therapy.

[0035] In yet another aspect, the present disclosure provides a method of treating metabolic dysfunction-associated steatotic liver disease (MASLD) and metabolic dysfunction-associated steatohepatitis (MASH) in a patient in need; the method comprises administering to the patient the siRNA molecule described herein, or the composition thereof.

### BRIEF DESCRIPTION OF DRAWINGS

[0036] FIG. 1A illustrates use of an exemplary siRNA (duplex ID=SR122) to assess the serum bile acid (sBA) response when administered at a single dose of 3 mg/kg (3 mpk) or at 10 mg/kg (10 mpk). At the 3 mpk dose, a durable response is observed for 90 days. At the 10 mpk dose, a durable response is observed for 120 days.

[0037] FIG. 1B illustrates use of an exemplary siRNA (duplex ID=SR122) to assess the impact of SLC10A1 gene expression using a control, 3 mpk, and 10 mpk doses. At days 28, 60, and 90, the 10 mpk dose is illustrated on the left and the 3 mpk is illustrated on the right. The 10 mpk dose was further assessed on days 120 and 150. Robust gene knockdown was observed at both doses.

[0038] FIG. 1C illustrates use of an exemplary siRNA (duplex ID=SR122) in liver function tests (LFTs) over the course of the 10 mpk study as assessed at 0, 21, 45, 65, and 119 days for (left to right) ALT, ALP, AST, and TBIL. As illustrated in this figure, LFTs remain unchanged from baseline values.

[0039] FIG. 2 illustrates use of an exemplary siRNA (duplex ID=SR319) as a mouse NTCP-targeting surrogate siRNA for in vivo studies.

[0040] FIG. 3 illustrates a study design for a seven-day bile-duct ligation (BDL) mouse model to study an exemplary siRNA (duplex ID=SR319) and an exemplary small molecule (“SMOL”).

[0041] FIG. 4 illustrates that inhibiting NTCP with an exemplary siRNA (duplex ID=SR319) or an exemplary small molecule (“SMOL”) increases the concentration of serum taurocholic acid (TCA), a bile acid, when compared to BDL+Vehicle.

[0042] FIG. 5 illustrates that inhibiting NTCP with an exemplary siRNA (duplex ID=SR319) or an exemplary small molecule (“SMOL”) reduces serum ALP and ALT at days 3 and 7. For a given day, the bars as read from left to right relate to data for: Sham+Vehicle; BDL+Vehicle; BDL+SMOL; and BDL+SR319.

[0043] FIG. 6 illustrates that inhibiting NTCP with an exemplary siRNA (duplex ID=SR319) or an exemplary small molecule (“SMOL”) reduces inflammatory, fibrotic and proliferative markers.

[0044] FIG. 7 illustrates that an exemplary siRNA (duplex ID=SR319) or an exemplary small molecule (“SMOL”) each lower intracellular bile acids as evidenced by reduced FXR signaling.

### DETAILED DESCRIPTION

### Definitions

[0045] The terminology used herein is for the purpose of describing particular embodiments only and is not intended to be limiting.

[0046] As used herein, the singular forms “a”, “an” and “the” are intended to include the plural forms as well, unless the context clearly indicates otherwise. Furthermore, to the extent that the terms “including”, “includes”, “having”, “has”, “with”, or variants thereof are used in either the detailed description and or the claims, such terms are intended to be inclusive in a manner similar to the term “comprising.”

[0047] The term “about” or “approximately” means within an acceptable error range for the particular value as determined by one of ordinary skill in the art, which will depend in part on how the value is measured or determined, i.e., the limitations of the measurement system. For example, “about” can mean within 1 or more than 1 standard deviation, per the practice in the art. Alternatively, “about” can mean a range of up to 20%, up to 10%, up to 5%, and up to 1% of a given value. Alternatively, particularly with respect to biological systems or processes, the term can mean within an order of magnitude, e.g., within 5-fold, or within 2-fold, of a value. Where particular values are described in the application and claims, unless otherwise stated the term “about” meaning within an acceptable error range for the particular value should be assumed.

[0048] Complementary: As used herein, the term “complementary” refers to the ability of polynucleotides to form base pairs with one another. Base pairs are typically formed by hydrogen bonds between nucleotide units in antiparallel polynucleotide strands. Complementary polynucleotide strands can base pair in the Watson-Crick manner (e.g., A to T, A to U, C to G), or in any other manner that allows for the formation of duplexes. As persons skilled in the art are aware, when using RNA as opposed to DNA, uracil rather than thymine is the base that is considered to be complementary to adenosine. However, when a U is denoted in the context of the present invention, the ability to substitute a T is implied, unless otherwise stated. “100% complementarity” or “100% complementary to” refers to the situation in which each nucleotide unit of one polynucleotide strand can hydrogen bond with a nucleotide unit of a second polynucleotide strand. Less than perfect complementarity refers to the situation in which some, but not all, nucleotide units of two strands can hydrogen bond with each other. For example, for two 20-mers, if only two base pairs on each strand can hydrogen bond with each other, the polynucleotide strands exhibit 10% complementarity. In the same example, if 18 base pairs on each strand can hydrogen bond with each other, the polynucleotide strands exhibit 90% complementarity.

[0049] Effective amount: As used herein, the term “effective amount” is meant the amount required to reduce or improve at least one symptom of a disease relative to an untreated patient. The effective amount of active compound(s) used to practice the present invention for therapeutic treatment of a disease varies depending upon the manner of administration, the age, body weight, and general health of the subject.

[0050] mRNA: As used herein, the term “mRNA” refers to a nucleic acid transcribed from a gene from which a polypeptide is translated, and may include non-translated regions such as a 5′UTR and/or a 3′UTR. It will be understood that a siRNA of the invention may comprise a nucleotide sequence that is complementary to any sequence of an mRNA molecule, including translated regions, the 5′UTR, the 3 UTR, and sequences that include both a translated region and a portion of either 5′UTR or 3′UTR. A siRNA of the invention may comprise a nucleotide sequence that is complementary to a region of an mRNA molecule spanning the start codon or the stop codon. The term “mRNA transcript” refers to the product resulting from RNA polymerase catalyzed transcription of a DNA sequence. When the RNA transcript is a perfect complementary copy of the DNA sequence, it is referred to as the primary transcript or it may be a RNA sequence derived from posttranscriptional processing of the primary transcript and is referred to as the mature RNA. “Messenger RNA” (mRNA) refers to the RNA that is without introns and that can be translated into protein by the cell. “cDNA” refers to a single- or a double-stranded DNA that is complementary to and derived from mRNA.

[0051] Nucleotide: As used herein, the term “nucleotide” refers to a ribonucleotide or a deoxyribonucleotide or modified form thereof, as well as an analog thereof. Nucleotides include species that comprise purines, e.g., adenine, hypoxanthine, guanine, and their derivatives and analogs, as well as pyrimidines, e.g., cytosine, uracil, thymine, and their derivatives and analogs. Nucleotide analogs include nucleotides having modifications in the chemical structure of the base, sugar and/or phosphate, including, but not limited to, 5-position pyrimidine modifications, 8-position purine modifications, modifications at cytosine exocyclic amines, and substitution of 5-bromo-uracil; and 2′-position sugar modifications, including but not limited to, sugar-modified ribonucleotides in which the 2′-OH is replaced by a group such as an H, OR, R, halo, SH, SR, NH₂, NHR, NR₂, or CN, wherein R is an alkyl moiety. Nucleotide analogs are also meant to include nucleotides with bases such as inosine, queuosine, xanthine, sugars such as 2′-methyl ribose, non-natural phosphodiester linkages such as methylphosphonates, phosphorothioates and peptides. The term nucleotide is also meant to include what are known in the art as universal bases. By way of example, universal bases include but are not limited to 3-nitropyrrole, 5-nitroindole, or nebularine. The term “nucleotide” is also meant to include the N3′ to P5′ phosphoramidate, resulting from the substitution of a ribosyl 3′ oxygen with an amine group.

[0052] Pharmaceutically acceptable: As used herein, the term “pharmaceutically acceptable” refers to those properties and/or substances that are acceptable to the patient from a pharmacological/toxicological point of view and to the manufacturing pharmaceutical chemist from a physical/chemical point of view regarding composition, formulation, stability, patient acceptance and bioavailability. “Pharmaceutically acceptable carrier” refers to a medium that does not interfere with the effectiveness of the biological activity of the active ingredient(s) and is not toxic to the host to which it is administered. The term “pharmaceutical composition” or “pharmaceutically acceptable composition” refers to a mixture of at least one compound or molecule useful within the invention with a pharmaceutically acceptable carrier. The pharmaceutical composition facilitates administration of the compound or molecule to a patient. Multiple techniques of administering a compound or molecule exist in the art including, but not limited to, intravenous, subcutaneous, oral, aerosol, parenteral, ophthalmic, pulmonary and topical administration. As used herein, the term “pharmaceutically acceptable carrier” means a pharmaceutically acceptable material, composition or carrier, such as a liquid or solid filler, stabilizer, dispersing agent, suspending agent, diluent, excipient, thickening agent, solvent or encapsulating material, involved in carrying or transporting a compound or molecule useful within the invention within or to the patient such that it may perform its intended function. Typically, such constructs are carried or transported from one organ, or portion of the body, to another organ, or portion of the body. Each carrier must be “acceptable” in the sense of being compatible with the other ingredients of the formulation, including the compound useful within the invention, and not injurious to the patient. Some examples of materials that may serve as pharmaceutically acceptable carriers include: sugars, such as lactose, glucose and sucrose; starches, such as corn starch and potato starch; cellulose, and its derivatives, such as sodium carboxymethyl cellulose, ethyl cellulose and cellulose acetate; powdered tragacanth; malt; gelatin; talc; excipients, such as cocoa butter and suppository waxes; oils, such as peanut oil, cottonseed oil, safflower oil, sesame oil, olive oil, corn oil and soybean oil; glycols, such as propylene glycol; polyols, such as glycerin, sorbitol, mannitol and polyethylene glycol; esters, such as ethyl oleate and ethyl laurate; agar; buffering agents, such as magnesium hydroxide and aluminum hydroxide; surface active agents; alginic acid; pyrogen-free water; isotonic saline; Ringer's solution; ethyl alcohol; phosphate buffer solutions; and other non-toxic compatible substances employed in pharmaceutical formulations. As used herein, “pharmaceutically acceptable carrier” also includes any and all coatings, antibacterial and antifungal agents, and absorption delaying agents, and the like that are compatible with the activity of the compound useful within the invention, and are physiologically acceptable to the patient. Supplementary active compounds may also be incorporated into the compositions. The “pharmaceutically acceptable carrier” may further include a pharmaceutically acceptable salt of the compound or molecule useful within the invention. Other additional ingredients that may be included in the pharmaceutical compositions used in the practice of the invention are known in the art and described, for example in Remington's Pharmaceutical Sciences (Genaro, Ed., Mack Publishing Co., 1985, Easton, Pa.), which is incorporated herein by reference.

[0053] Prevent: As used herein, the terms “prevent,” “preventing,” “prevention,” and the like refer to reducing the probability of developing a disorder or condition in a subject, who does not have, but is at risk of or susceptible to developing a disorder or condition.

[0054] Reduce: As used herein, the terms “reduce” or “reducing” or “reduction” refer to silencing, eliminating, knock-down, knock-out, and/or decreasing expression of a target gene. The term “reduced” is used herein to indicate that the target gene expression is lowered by 1-100%, or 10-100%, 20-80%, 30-80%, or 40-60%. For example, the expression may be reduced by at least 10%, at least 20%, at least 30%, at least 40%, at least 50%, at least 60%, at least 70%, at least 80%, at least 90%, at least 95%, or even 99% knock-down of gene expression can be directed by the use of siRNAs or other interfering nucleic acids.

[0055] siRNA: As used herein, the terms “small interfering” or “short interfering RNA” or “siRNA” is a RNA duplex of nucleotides that is targeted to a gene interest. A “RNA duplex” refers to the double-stranded region formed by the complementary pairing between two sense and anti-sense regions of a RNA molecule. siRNA is “targeted” to a gene in that the nucleotide sequence of the duplex portion of the siRNA is complementary to a nucleotide sequence of the targeted gene. In some embodiments, the length of the duplex (i.e., the double stranded region) of siRNAs is less than 30 nucleotides. The duplex can be 29, 28, 27, 26, 25, 24, 23, 22, 21, 20, 19, 18, 17, 16, 15, 14, 13, 12, 11 or 10 nucleotides in length. In general, the length of the duplex can be 19, 21, or 23 nucleotides in length.

[0056] Subject: As used herein, the term “subject” or “patient,” may be a human or non-human mammal. Non-human mammals include, for example, livestock and pets, such as ovine, bovine, porcine, canine, feline and murine mammals. Preferably, the subject is human.

[0057] Target gene: As used herein, “target gene” refers to a nucleic acid sequence in a cell, wherein the expression of the sequence may be specifically and effectively modulated using siRNAs and methods described herein. A “gene” is used broadly to refer to any segment of nucleic acid associated with a biological function. Thus, genes include coding sequences and/or the regulatory sequences required for their expression. For example, “gene” refers to a nucleic acid fragment that expresses mRNA, functional RNA, or specific protein, including regulatory sequences. “Genes” also include nonexpressed DNA segments that, for example, form recognition sequences for other proteins. “Genes” can be obtained from a variety of sources, including cloning from a source of interest or synthesizing from known or predicted sequence information, and may include sequences designed to have desired parameters.

[0058] Therapeutically-effective amount: As used herein, the term “therapeutically-effective amount” refers to an amount of a compound, material, or composition comprising an oligonucleotide herein which is effective for producing some desired therapeutic effect in at least a sub-population of cells in an animal at a reasonable benefit/risk ratio applicable to any medical treatment.

[0059] Treat: The terms “treatment,” “treating,” “treat” and the like, when used in the context of a disease, injury or disorder, are used herein to generally mean obtaining a desired pharmacologic and/or physiologic effect, and may also be used to refer to improving, alleviating, and/or decreasing the severity of one or more symptoms of a condition being treated. The effect may be prophylactic in terms of completely or partially delaying the onset or recurrence of a disease, condition, or symptoms thereof, and/or may be therapeutic in terms of a partial or complete cure for a disease or condition and/or adverse effect attributable to the disease or condition. “Treatment” as used herein covers any treatment of a disease or condition of a mammal, particularly a human, and includes: (a) preventing the disease or condition from occurring in a subject which may be predisposed to the disease or condition but has not yet been diagnosed as having it; (b) inhibiting the disease or condition (e.g., arresting its development); or (c) relieving the disease or condition (e.g., causing regression of the disease or condition, providing improvement in one or more symptoms).

### NTCP and Biological Functions

[0060] Na⁺-taurocholate Co-transporting Polypeptide (NTCP) is a hepatic uptake transporter in the basolateral membrane of the hepatocyte to uptake bile acids from plasma, playing a crucial role in the enterohepatic circulation of bile acids (Hagenbuch and Dawson, 2004, Pflugers Arch. 447, 566-570). Bile acids are the catabolic product of cholesterol metabolism; hence this protein is important for cholesterol homeostasis. In addition to their role in metabolism, bile acids also act as transcriptional regulators via certain nuclear receptors (NRs). For example, bile acids are strong activators (ligands) for FXR signaling pathway, which plays an important role in balancing bile acids in the liver.

[0061] Increased intracellular accumulation of bile acids ultimately results in bile acid-induced hepatocellular damage and apoptosis. NTCP is a key player in this coordinated response designed to help shield the hepatocyte from bile acid damage. The key role of NTCP in cholestasis makes it a superior target for treating a cholestatic disorder.

[0062] NTCP is also a functional entry receptor for hepatitis B virus (HBV) and hepatitis D virus (HDV). HBV as well as HDV attach with low-affinity to heparan sulfate proteoglycans on the surfaces of hepatocytes. After this initial attachment, both viruses bind to NTCP through a high-affinity interaction followed by internalization of the viral particles. It has been shown that preventing interaction between this cell surface receptor and HBV or HDV viral particle can inhibit HBV and HDV infection. For example, Yan et al. (Down-regulation of cell membrane localized NTCP expression in proliferating hepatocytes prevents hepatitis B virus infection, Emerg, Microbes Infect. 2019, 8(1): 879-894) reported that primary human hepatocytes with downregulates NTCP result in a reduced or even complete loss of HBV infection capacity. As NTCP plays an essential role in in HBV and HDV infection cycle, NTCP has been exploited as a potential target to develop new antiviral therapies.

[0063] NTCP has a pivotal role in bile acid dynamics, bile acid signaling and in viral infection of the liver.

[0064] NTCP in humans is encoded by the gene SLC10A1 (solute carrier family 10 (sodium/bile acid cotransporter) member 1), which is mainly expressed in the liver. Human SLC10A1 mRNA (Gene Bank Ref. No. NM_003049.4) comprises the sequence of

GATTAAAGAAGGCATCCAGCAAGAACTGCACAAGAAACGGAGTCAGCCGG
AGAACAAGGAGTGGTCTTCCACTGCCTCACAGGAGGATGGAGGCCCACAA
CGCGTCTGCCCCATTCAACTTCACCCTGCCACCCAACTTTGGCAAGCGCC
CCACAGACCTGGCACTGAGCGTCATCCTGGTGTTCATGTTGTTCTTCATC
ATGCTCTCGCTGGGCTGCACCATGGAGTTCAGCAAGATCAAGGCTCACTT
ATGGAAGCCTAAAGGGCTGGCCATCGCCCTGGTGGCACAGTATGGCATCA
TGCCCCTCACGGCCTTTGTGCTGGGCAAGGTCTTCCGGCTGAAGAACATT
GAGGCACTGGCCATCTTGGTCTGTGGCTGCTCACCTGGAGGGAACCTGTC
CAATGTCTTCAGTCTGGCCATGAAGGGGGACATGAACCTCAGCATTGTGA
TGACCACCTGCTCCACCTTCTGTGCCCTTGGCATGATGCCTCTCCTCCTG
TACATCTACTCCAGGGGGATCTATGATGGGGACCTGAAGGACAAGGTGCC
CTATAAAGGCATCGTGATATCACTGGTCCTGGTTCTCATTCCTTGCACCA
TAGGGATCGTCCTCAAATCCAAACGGCCACAATACATGCGCTATGTCATC
AAGGGAGGGATGATCATCATTCTCTTGTGCAGTGTGGCCGTCACAGTTCT
CTCTGCCATCAATGTGGGGAAGAGCATCATGTTTGCCATGACACCACTCT
TGATTGCCACCTCCTCCCTGATGCCTTTTATTGGCTTTCTGCTGGGTTAT
GTTCTCTCTGCTCTCTTCTGCCTCAATGGACGGTGCAGACGCACTGTCAG
CATGGAGACTGGATGCCAAAATGTCCAACTCTGTTCCACCATCCTCAATG
TGGCCTTTCCACCTGAAGTCATTGGACCACTTTTCTTCTTTCCCCTCCTC
TACATGATTTTCCAGCTTGGAGAAGGGCTTCTCCTCATTGCCATATTTTG
GTGCTATGAGAAATTCAAGACTCCCAAGGATAAAACAAAAATGATCTACA
CAGCTGCCACAACTGAAGAAACAATTCCAGGAGCTCTGGGAAATGGCACC
TACAAAGGGGAGGACTGCTCCCCTTGCACAGCCTAGCCCTTCCCCTGGTG
GCCTGGATTCTGGTCCCAAAGCAATTCTGAAAGCCAGTGTGGTAAACTAG
AGAGAGCAGCAAAAACACCAGTCTTGCCTGAGTCTTTCTCCAGCATTTCC
AGTACATCTATCAGAATCATCAAGTCTTGGCCGGGAACACAGACAGGGTG
TCTACCCAAGAAGCCTCACCTATCCCCAACTTAGAATTTGCTACTTATTT
TAAAGACTTGTTCAGTGACTGTAAACTCTATGAAACCAGAAACCGAATCT
GCCTCTTGCTGGGATCTCTAAAAGTGTCTGATAAGCATCTTAAAGTCACT
CAATTCCTGAACTAATCAATATATATGTTTAACCCATTACTCAAATACCC
AAATCCCATTCCAAGTTTTGTGACCCAAAAGAGAAATAAATGCTCACAAG
TGCTGTAGAATTAAACTTCAGAAGTTCTAACCTAAAAAGTTCAGATCCTA
TTCCTTCCCTTTTGACATTATTGGGATGATGCTCCCGAAAAGTCAAATTT
GACATCAAGTATGCAAAAGTGAACACAGTAAGATGCAATCAGGCAAAACA
AACTCAAAAAATAGCTAATGAAATGAAAAAACTGGGCGAATGCATCATGT
TAGTAGAGGAGGAAAACTTTTGACAAGGAAAAACCAGGAAACAAACACAT
ACATTAACACAATGTTACCTCACTAATAATCTCTTTTTTAAGTTCAGTAG
GTATTTGGTTTTAACACAAGGCGCCCCCAAAACTGGGTACAGCAAACTAC
TGCCAAAATGAGTCGTTTCCCAATTCAAAGAAAAATGTTCAAATACCTAG
AATTCACAAATTTCAAATTGTCTCTAATAAAATTTAAACATTTTGCATAT
CA
(GeneBank Ref. No. NM_003049. 4; SEQ ID NO: 1093)

siRNA Molecules Inhibiting the Expression of a SLC1041 mRNA Transcript

[0065] In one aspect of the present disclosure, provided included a small interfering RNA (siRNA) molecule that is capable of inhibiting the expression of a SLC10A1 mRNA transcript, particularly a human SLC10A1 mRNA transcript.

siRNA Molecules

[0066] Small interfering RNAs (siRNAs) can activate the RNAi pathway to inhibit the expression of genes through post-transcriptional gene silencing. siRNA has innate advantages over small molecular therapeutics and monoclonal antibody drugs because siRNA executes its function by complete Watson-Crick base pairing with mRNA, whereas small molecule and monoclonal antibody drugs need to recognize the complicated spatial conformation of certain proteins.

[0067] A siRNA is a double-stranded RNA (dsRNA) molecule comprising a sense strand and an antisense strand, in which the sense strand and antisense strand sequences form a double-stranded region (i.e., a duplex region) by the Watson-Crick base pairing interactions between the complementary base pairs of the sense and antisense strands of the siRNA. The identity of duplex is confirmed by melting temperature (Tm). The double stranded region (i.e., the duplex) of the siRNA may comprise 15-30 base pairs, or 17-28 base pairs, 17-25 base pairs, 21-23 base pairs, or 19-23 base pairs. As non-limiting examples, the double stranded region of the siRNA comprises 17 base pairs, 18 base pairs, 19 base pairs, 20 base pairs, 21 base pairs, 22 base pairs, 23 base pairs, 24 base pairs, or 25 base pairs. In one embodiment, the double stranded region of the siRNA molecule comprises 19 base pairs. In another embodiment, the double stranded region of the siRNA molecule comprises 21 base pairs.

[0068] siRNA exerts its effect at the post-transcriptional level. This siRNA duplex arises when long dsRNA is cleaved by Dicer, a member of the RNAse III family. The antisense strand of the duplex acts as a guide strand to incorporate the siRNA into RNA-induced silencing complex (RISC) where it interacts with its Argouate 2 component, resulting in duplex unwinding and degradation of the passenger strand (i.e., the sense strand). The antisense strand, which is complementary to the target mRNA, then guides the RISC complex to the mRNA, leading downregulation of the mRNA. siRNA only functions when its antisense strand sequence is completely base-paired to a sequence of the target mRNA. In some cases, a few mismatches are tolerated by the RNA-induced silencing complex (RISC) as well.

[0069] In accordance, the siRNA molecule of the present disclosure comprises a sequence complementary to a portion of the sequence of a SLC10A1 mRNA transcript. In some embodiments, the siRNA molecule has a mismatch of 4 base pairs or fewer to the portion of the sequence of the SLC10A1 mRNA transcript. As a non-limiting example, the siRNA molecule has a mismatch of 3 base pairs to the portion of the sequence of the SLC10A1 mRNA transcript. In another example, the siRNA molecule has a mismatch of 2 base pairs to the portion of the sequence of the SLC10A1 mRNA transcript. In another example, the siRNA molecule has a mismatch of 1 base pair to the portion of the sequence of the SLC10A1 mRNA transcript.

siRNA Modifications

[0070] To maximize the treatment potency and reduce or avoid the side effects of siRNA, a siRNA molecule may comprise one or more chemical modifications. Chemically modified nucleotides can increase siRNA efficacy, specificity, and stability, reduce its toxicity and immunogenicity, and decrease off-target effects. Chemically modified siRNAs, such as siRNAs with substitution of the 2′-OH with a 2′-O-methyl (2′-OMe) or 2′-methoxyethyl (2′-MOE) group or the substitution of certain nucleotides with locked nucleic acid (LNA), unlocked nucleic acid (UNA) and glycol nucleic acid (GNA) can efficiently suppress immunostimulatory siRNA-driven innate immune activation, enhance activity and specificity, and reduce off-target-induced toxicity.

[0071] According to the natural structure of nucleotides, chemical modifications can be placed at the phosphate backbone, the ribose moiety or the base. Typically, these modifications are simultaneously introduced in siRNA, e.g., the combination of 2′-OMe and phosphorothioate (PS) modifications and the combination of 2′-OMe and 2′-deoxy-2′-fluoro (2′-F).

[0072] In some embodiments, the siRNA modifications comprise one or more phosphonate modifications of the backbone of the siRNA.

[0073] In one embodiment, the phosphorothioate (PS) linkage is introduced in the siRNA molecule described herein. This modification was achieved by leveraging a sulfur atom to replace one nonbridging oxygen of a phosphodiester. PS linkage endows modified nucleic acids with resistance to nucleases and PS modified siRNAs can more readily combine with plasma proteins, such as albumin. The position and number of PS linkages vary. In some embodiments, the sense strand comprises at least 1, 2, 3, 4, 5, 6, 7, 8, 9, 10, 11, 12, 13, 14, 15, 16, 17, 18, 19, 20, 21, 22 or 23 of PS linkages. In some embodiments, the antisense strand comprises at least 1, 2, 3, 4, 5, 6, 7, 8, 9, 10, 11, 12, 13, 14, 15, 16, 17, 18, 19, 20, 21, 22 or 23 of PS linkages. In some embodiments, both the sense strand and the antisense strand of a siRNA comprise PS linkages.

[0074] In some embodiments, the PS linkages position at the 3′ end of the sense strand sequence. In some embodiments, the PS linkages position at the 3′ end of the antisense strand sequence. In some embodiments, the PS linkages position at the 5′ end of the sense strand sequence. In some embodiments, the PS linkages position at the 5′ end of the antisense strand sequence. In some embodiments, the PS linkages position at the 3′ and 5′ ends of the sense strand sequence. In some embodiments, the PS linkages position at the 3′ and 5′ ends of the antisense strand sequence. In some embodiments, the PS linkages position at various positions of the sense strand sequence. In some embodiments, the PS linkages position at various positions of the antisense strand sequence.

[0075] In addition, other residues used to replace the phosphodiester group in the siRNA, including but not limited, phosphorodithioate (PS2), methylphosphonate (MP), methoxypropylphosphonate (MOP) and peptide nucleic acid (PNA).

[0076] In some embodiments, the siRNA described herein comprises a phosphonate modification with various analogs at the 5′-end of the siRNA. The 5′-phosphate of the siRNA is required for RISC loading. A 5′-phosphate can be modified via either phosphorylation in cells or by chemical synthesis. In some embodiments, an analog that have similar conformation and steroidal electronic properties to natural phosphates but is resistant to dephosphorylases. As non-limiting examples, the analog is 5′-(E)-vinyl phosphonate (5′-(E)-VP), 5′-methylphosphonate, (S)-5′-C-methyl with phosphate, or 5′-phosphorothioate. In some embodiments, 5′-(E)-VP decoration, which substitutes bridge oxygen and carbon with E-vinyl phosphonate moieties at the 5′-end, is the most potent and metabolically stable mechanism. The replaced hydrophobic substitutions enhance the stability of intact siRNAs and are favorable for RISC loading.

[0077] In some embodiments, the siRNA described herein may further comprise inverted deoxythymine (idT) at the strand terminus and/or termini, including UNA and X (without nucleoside base), flanking the UAU or UAUAU motif(s).

[0078] In some embodiments, the siRNA described herein comprises one or more ribose modifications.

[0079] In some embodiments, the siRNA described herein comprises one or more ribose modification at the 2′ position. Notably, 2′-O-methyl (2′-OMe) is the most frequently used modification in nucleic acid based drug. 2′-OMe modification can enhance stability of the siRNA by blocking the nucleophilic 2′-OH group. In other embodiments, other modifications at the 2′ position include 2′-O-methoxyethyl (2′-O-MOE), 2′-deoxy-2′-fluoro (2′-F), 2′-arabino-fluoro (2′-Ara-F), 2′-O-benzyl and 2′-O-methyl-4-pyridine (2′-O—CH2Py(4)).

[0080] In addition, 2′-C, 4′-C, and the whole sugar ring may be modified, resulting in ribose analogs including UNAs, LNAs, GNAs (glycol nucleic acids), (S)-cEt-BNAs, tricyclo-DNA (tcDNA) and phosphorodiamidate morpholino oligomers (PMOs). Without wishing to be bound by any theory, UNA, with higher flexibility and thermal destabilization than the unmodified product due to unconnected 2′ and 3′ carbons, can block the entry of passenger strands and promote the RISC loading of the guide strand by introducing chemical asymmetry into duplex siRNAs. GNA can be used to erase off-target effect-induced hepatotoxicity by including it in the seed region of the siRNA guide strand. LNA is a bicyclic structure that contains a bridge between the 2′ oxygen and the 4′ carbon. It “locks” the ribose into its preferred C3′-endo conformation and significantly increases the affinity of base pairing. In some embodiments, the modifications may comprise one or more bicyclic and tricyclic analogs, including ethyl-bridged nucleic acids (ENAs), constrained ethyl (cEt) nucleic acids and tricyclo-DNA.

[0081] In some embodiments, the siRNA described herein comprises one or more base modifications.

[0082] Base replacement is of great benefit to nucleic acid-based drugs. In some embodiments, the siRNA described herein comprises one or more base modification and/or base analogs. The base analogs include but are not limited to, pseudouridine, 2-thiouridine, N6-methyladenosine, 5-methylcytidine, N-ethylpiperidine triazole-modified adenosine analogs, N-ethylpiperidine 7-EAA triazole, 6′-phenylpyrrolocytosine (PhpC), uridine substitution of 2,4-difluorotolylribonucleoside (rF) and 5-fluoro-2′-deoxyuridine (FdU). Moreover, many other less common base analogs may be used in siRNA modifications.

[0083] The effects of various modifications on siRNA activity, specificity and toxicity vary; different modification patterns of siRNAs are tested clinically. In some embodiments, a universal modification pattern (e.g., standard template chemistry (STC)) is applied to the siRNA described herein. As a non-limiting example, when the lengths of the sense and the antisense of a siRNA are 21 and 23 nt, respectively, 2 PS linkages are placed at the 3′ terminus of the antisense strand, three consecutive 2′-F moieties are incorporated at positions 9, 10 and 11 of the sense strand from the 5′-end, and consecutive 2′-OMe modifications are placed at positions 11, 12 and 13 of the antisense strand from the 5′-end. Moreover, alternative 2′-OMe and 2′-F moieties are employed at other positions in both strands. In some embodiments, 2′-OMe and 2′-F are complementarily used for all positions of both strands of siRNA.

[0084] In some embodiments, a siRNA described herein comprises modifications to the overhangs and/or termini. In some cases, the 3′ end overhang is modified. In some cases, the 5′ end overhang is modified. In some cases, the 5′ blunt terminus and/or the 3′ end blunt terminus are modified. In other cases, the 3′ and 5′ end overhangs are modified.

[0085] The termini of siRNA can be modified in a variety of ways, for example, phosphorylation at the 5′ end of the sense strand. Cell penetrating peptides, steroids, lipids, and other moieties can be linked to the siRNA termini to enhance the delivery of siRNA.

[0086] In some embodiments, a siRNA described herein may comprise modifications to the duplex (i.e., the doubled-stranded) region.

siRNA Conjugates

[0087] Diverse ligands including small molecules, carbohydrates, lipids, aptamers, peptides and antibodies can be covalently linked to siRNA in order to improve cellular uptake, target specific cell types, increase stability of the siRNAs and reduce the immunogenicity of the siRNAs, etc. An advantage of siRNA conjugates is that they reduce the need for extra delivery materials, and may thereby improve the tolerability and safety profile of the delivery formulation.

[0088] For example, the conjugation of a synthetic tri-antennary N-acetylgalactosamine (GalNAc) ligand to a siRNA molecule can increase delivery of siRNA therapeutics to hepatocytes in vivo as the Tri-GalNAc ligand can bind with high affinity and specificity to the asialoglycoprotein receptor (ASGPR), a hepatocyte transmembrane glycoprotein that is highly expressed on hepatocytes. GalNAc-siRNA conjugates have sustained effect on silencing the expression of the target gene.

[0089] In some embodiments, the siRNA is conjugated to one or more N-acetyl-D-galactose (GalNAc) residues. A siRNA that is conjugated to N-acetyl-D-galactose is referred to herein as a “GalNAc siRNA conjugate.” The following patent documents describe methods for conjugating nucleic acids like siRNAs to GalNAc: U.S. Pat. No. 8,575,123; U.S. Publication No. 2009/0239814; and U.S. Pat. No. 9,708,607. Each of the aforementioned patent documents is incorporated by reference herein in its entirety. In some cases, the GalNAc may have any structure described in U.S. Pat. Nos. 8,575,123; 8,106,022; 8,828,956; 9,506,306; 8,313,772; 9,011,919; 9,345,775; and 10,316,316; and U.S. Publication No. 2009/0239814; and U.S. Pat. No. 9,708,607, except that the nucleic acid sequence described in these patent documents is replaced by a siRNA described herein. In other cases, the GAlNAc is a derivative disclosed in US Application Publication No. US20200270611, the contents of which are incorporated herein by reference in their entirety. Without being bound by theory, GalNAc siRNA conjugates bind the asialoglycoprotein receptor (ASGPR). ASGPR is selectively expressed in hepatocytes. The interaction between GAlNAc and ASGPR leads to uptake of a GalNAc siRNA conjugate to a specific cell (e.g., hepatocyte).

[0090] Conjugation can be performed on the sense strand, e.g., 5′ end and/or 3′ end of the sense strand of the siRNA. Conjugation can also be performed on the antisense strand, e.g., 3′ end of the antisense strand. In some cases, conjugation can also be performed at the 5′ end of the antisense strand though the 5′ end of the antisense strand is required for silencing activity of the siRNA.

[0091] In some embodiments, a conjugate is linked to a nucleotide of a siRNA directly, for example, via a phosphodiester bond. In some embodiments, a linker is used for conjugating a siRNA to one or more conjugates (e.g., GalNAc). The conjugated siRNA may have a formula of A-L-B (A=siRNA; L=linker and B=conjugate). In some embodiments, the linker is a bivalent C₁-C₅₀ saturated or unsaturated, straight or branched alkyl, wherein 1-25 methylene groups are optionally and independently replaced by —N(H)—, —N(C₁-C₄ alkyl)-, —N(cycloalkyl)-, —O—, —C(O)—, —C(O)O—, —S—, —S(O)—, —S(O)₂—, —S(O)₂N(C₁-C₄ alkyl)-, —S(O)₂N(cycloalkyl)-, —N(H)C(O)—, —N(C₁-C₄ alkyl)C(O)—, —N(cycloalkyl)C(O)—, —C(O)N(H)—, —C(O)N(C₁-C₄ alkyl), —C(O)N(cycloalkyl), aryl, heteroaryl, cycloalkyl, or cycloalkenyl. In some embodiments, the linker is a non-cleavable linker. In other embodiments, the linker is a cleavable linker. The linker described herein can be a non-polymeric linker. A non-polymeric linker refers to a linker that does not contain a repeating unit of monomers generated by a polymerization process. Exemplary non-polymeric linkers include, but are not limited to, C₁-C₆ alkyl group (e.g., a C₅, C₄, C₃, C₂, or C₁ alkyl group), homobifunctional cross linkers, heterobifunctional cross linkers, peptide linkers, traceless linkers, self-immolative linkers, maleimide-based linkers, or combinations thereof. In some cases, the non-polymeric linker comprises a C₁-C₆ alkyl group (e.g., a C₅, C₄, C₃, C₂, or C₁ alkyl group), a homobifunctional cross linker, a heterobifunctional cross linker, a peptide linker, a traceless linker, a self-immolative linker, a maleimide-based linker, or a combination thereof. In additional cases, the non-polymeric linker does not comprise more than two of the same type of linkers, e.g., more than two homobifunctional cross linkers, or more than two peptide linkers. In further cases, the non-polymeric linker optionally comprises one or more reactive functional groups. In some embodiments, the linker is an aminohexyl linker (e.g., —(CH₂)₆NH—).

### Combinations

[0092] In some embodiments, a siRNA molecule may comprise a combination of various modifications and conjugates to achieve a desired effect, e.g., sustained silencing and in vivo stability. In some embodiments, combining 2′-O-methyl (2′-OMe) and 2′-deoxy-2′-fluoro (2′-F) ribosugar modifications throughout both strands of the siRNA with terminal phosphorothioate (PS) linkages can provide protection against 30 and 50 exonucleases.

[0093] In some embodiments, a siRNA molecule may comprise a combination of sugar, base and backbone modifications and a terminal GalNAc conjugate.

siRNA Synthesis

[0094] In some embodiments, siRNAs can be synthesized using solid-phase synthesis. RNA synthesis is a repetitive chemical cycle in which each nucleotide is added on a solid support. This cycle starts with a deprotection step to remove the protective group on 5′-hydroxyl of the solid support bound nucleotide. The resulting 5′-hydroxyl is then coupled with an activated 3′-phosphorous ester, followed by a capping step to remove the unreacted nucleotides from the reaction system. The intermediate undergoes another step to oxidize phosphite to phosphorous ester. After the chain assembly, the oligomer is released from the solid support, deprotected, and purified by HPLC.

[0095] In some embodiments, chemical modifications and conjugates and siRNA synthesis can be performed using parallel synthesis and linear synthesis. For parallel synthesis, siRNA and its relevant conjugate ligand are synthesized in separate synthetic routes and then are conjugated with each other usually through biodegradable bonds (e.g., Jeong et al., siRNA conjugate delivery systems. Bioconjugate Chem. 2009, 20, 5-14; the contents of which are incorporated herein by reference it their entirety.) Linear synthesis (functional groups are added sequentially) is also widely used for a variety of chemical conjugations to siRNA.

siRNA Delivery

[0096] A series of barriers need to be circumvented for systemically administered exogenous siRNA before it can achieve gene silencing. In blood circulation, unspecific binding and glomerular filtration both hamper the accumulation of siRNA in desired tissues. The neutral surface charge of siRNA-loaded nanoformulations is beneficial for avoiding unfavorable protein binding in circulation. siRNA is ˜7-8 nm in length and 2-3 nm in diameter. The relatively high molecular weight (˜13-16 kD) and net negative charge prevent artificial siRNA from crossing the cell membrane. Encapsulating siRNA into vesicles or conjugating it to certain ligands can effectively deliver siRNA to the desired tissues or cells.

### Lipid Based Delivery Systems

[0097] Phospholipids are natural components of cell membranes that form lipid bilayers. Liposomes comprising one or more synthetic lipids can be used for developing lipid-based siRNA delivery systems. In some embodiments, Lipid nanoparticles (LNPs) are used to deliver siRNA into cells. Lipid-based nanoparticles (LPNs), particularly lipids with single or multiple cationic centers are highly effective carriers of siRNA.

[0098] In some embodiments, Stabilized Nucleic Acid Lipid Particles (SNALPs) are used for intracellular delivery of siRNA molecules. SNALPs are typically composed of a formulation consisting of an amine-based lipid, cholesterol, a PEG-lipid, as well as helper phospholipids. For example, a LNP comprises DlinDMA, 1,2-distearoyl-sn-glycero-3-phosphocholine (DSPC) as a helper lipid, mPEGC-DMA, and cholesterol (DlinDMA:DSPC:Chol:PEG-C-DMA 30:20:48:2 molar percent (Heyes et al., Cationic lipid saturation influences intracellular delivery of encapsulated nucleic acids. J. Controlled Release 107, 2005, 276-287; the contents of which are incorporated herein by reference in their entireties.)

[0099] Cationic lipids (or amino lipids) are central components of LNPs, as they play a role in the assembly of the nanoparticles, by binding the siRNA through electrostatic interactions. These amino groups also facilitate endosomal escape, through interaction with endosomal components during acidification. A typical cationic lipid includes a cationic head group, a linker, and two long hydrophobic domains.

[0100] Exemplary cationic lipids include but are not limited to DLin-KC2-DMA, DLin-MC3-DMA, 7C1 and L319.

[0101] In addition to cation lipids with single cationic center, lipid derivatives and lipid-like materials with multiple cationic centers can also be used for developing lipid based siRNA delivery systems, for example, aminoglycoside and amino acid derivatives (e.g., an arginine based lipid, AtuFECT01). Aminoglycoside-based lipids are composed of an aminoglycosides head, an amide linker, and two unsaturated tails (e.g., DOPE).

[0102] Other lipid like molecules, e.g., lipidoids, can also be used for siRNA delivery. Lipidoids are composed of one or more amine centers and multiple hydrophobic tails. Diverse lipidoids can be synthesized with a range of functional amines and acrylates or acrylamides (for example through a one-step Michael addition reaction without the need of catalysts or solvents). The amino groups can function similarly to the amino head group in the lipid nanoparticles by neutralizing negative charges of siRNA and facilitating cytoplasmic release of siRNA.

[0103] Various lipidoids for siRNA delivery can be developed using different methods such as epoxide-based chemistry.

[0104] Exemplary lipidoids include C12-200, cKK-E12. C12-200 is composed of a piperazine ring and five lipid tails. The ED₅₀ of siRNA formulated with C12-200 was reported as low as 0.01 mg/kg for hepatocytes in mice. The potency of this formulation also allows the potential for simultaneous gene silencing. C12-200 shows to be the most potent and selective siRNA delivery systems for gene silencing reported thus far for hepatocytes (Dong, et al. Lipopeptide nanoparticles for potent and selective siRNA delivery in rodents and nonhuman primates. Proc Natl Acad Sci USA, 2014, 111(11):3955-3960).

Polymer-Based siRNA Delivery Systems

[0105] One or more polymers may be used for siRNA delivery.

[0106] Interaction between positively charged groups on polymer chains and the negatively charged phosphates in siRNA molecules can allow polymeric carriers to complex siRNA.

[0107] In some embodiments, siRNAs to be delivered can be directly conjugated to polymers to improve cellular uptake, and delivery of the siRNAs. Polymers such as poly(ethylene glycol) (PEG) and poly(lactic-co-glycolic acid) (PLGA) have been conjugated to siRNA to facilitate delivery.

[0108] In some cases, block copolymers can be used for siRNA delivery. For example, PLGA-based block copolymer systems are used for systemic delivery of siRNA against various targets.

[0109] The use of well-defined polymer architecture and precise cross-linking chemistry are also useful strategies for siRNA delivery. Incorporation of two or three cysteine cross-links into poly(amido amines) is critical to achieve siRNA delivery (Schaffert, et al. Solid-phase synthesis of sequence-defined T-, i-, and U-shape polymers for pDNA and siRNA delivery. Angew. Chem. Int. Ed 2011, 50, 8986-8989).

[0110] In some cases, natural biopolymers can be used for siRNA delivery. It has been shown that cyclodextrin-based self-assembling polymeric nanoparticles can facilitate siRNA delivery.

[0111] Additionally, proteins can be used for siRNA delivery. A protamine-HIV-1 envelope antibody fusion protein can deliver siRNA selectively to cells expressing the HIV-1 envelope (Song et al., Antibody mediated in vivo delivery of small interfering RNAs via cell-surface receptors. Nat. Biotechnol, 2005, 23, 709-717).

Exemplary siRNA Molecules Targeting a SLC10A1 mRNA Transcript

[0112] The present disclosure, by bioinformatics-based selection and knockdown of the expression of SLC10A1 mRNA, identified siRNA molecules that can repress the expression of a SLC10A1 mRNA transcript specifically and effectively. In accordance, the present disclosure provides siRNA molecules with specificity and high efficacy to repress the expression of a human SLC10A1 mRNA transcript in a cell, e.g., a hepatocyte. In some embodiments, the siRNA molecule targeting the human SLC10A1 mRNA transcript comprises a sense strand comprising a sequence selected from the group consisting of SEQ ID NOs. 1-15 and 481-611, and an antisense strand comprising a sequence complementary to the sense strand sequence.

[0113] In some embodiments, the siRNA molecule described herein comprises an antisense strand comprising a sequence selected from the group consisting of SEQ ID NOs. 16-30 and 612-742, and a sense strand comprising a sequence complementary of the antisense strand sequence.

[0114] In some cases, the siRNA molecule described herein comprises a sense strand comprises a sequence at least about 80%, 85%, 90%, 95%, 96%, 97%, 98%, 99%, or 100% identical to a sequence selected from the group consisting of SEQ ID NOs. 1-15 and 481-611, and an antisense strand comprises a sequence at least about 80%, 85%, 90%, 95%, 96%, 97%, 98%, 99%, or 100% identical to the reverse complement of the sense strand of any one of SEQ ID NOs. 1-15 and 481-611. In some cases, the siRNA molecule described herein comprises an antisense strand comprises a sequence at least about 80%, 85%, 90%, 95%, 96%, 97%, 98%, 99%, or 100% identical to a sequence selected from SEQ ID NOs. 16-30 and 612-742 and a sense strand comprises a sequence at least about 80%, 85%, 90%, 95%, 96%, 97%, 98%, 99%, or 100% identical to the reverse complement of the antisense strand of any one of SEQ ID NOs. 16-30 and 612-742.

[0115] In some embodiments, the siRNA molecule described herein comprises a sense strand having a sequence of SEQ ID NO. 1 and an antisense strand having a sequence of SEQ ID NO. 16. In some embodiments, the siRNA molecule described herein comprises a sense strand having a sequence of SEQ ID NO. 2 and an antisense strand having a sequence of SEQ ID NO. 17. In some embodiments, the siRNA molecule described herein comprises a sense strand having a sequence of SEQ ID NO. 3 and an antisense strand having a sequence of SEQ ID NO. 18. In some embodiments, the siRNA molecule described herein comprises a sense strand having a sequence of SEQ ID NO. 4 and an antisense strand having a sequence of SEQ ID NO. 19. In some embodiments, the siRNA molecule described herein comprises a sense strand having a sequence of SEQ ID NO. 5 and an antisense strand having a sequence of SEQ ID NO. 20. In some embodiments, the siRNA molecule described herein comprises a sense strand having a sequence of SEQ ID NO. 6 and an antisense strand having a sequence of SEQ ID NO. 21. In some embodiments, the siRNA molecule described herein comprises a sense strand having a sequence of SEQ ID NO. 7 and an antisense strand having a sequence of SEQ ID NO. 22. In some embodiments, the siRNA molecule described herein comprises a sense strand having a sequence of SEQ ID NO. 8 and an antisense strand having a sequence of SEQ ID NO. 23. In some embodiments, the siRNA molecule described herein comprises a sense strand having a sequence of SEQ ID NO. 9 and an antisense strand having a sequence of SEQ ID NO. 24. In some embodiments, the siRNA molecule described herein comprises a sense strand having a sequence of SEQ ID NO. 10 and an antisense strand having a sequence of SEQ ID NO. 25. In some embodiments, the siRNA molecule described herein comprises a sense strand having a sequence of SEQ ID NO. 11 and an antisense strand having a sequence of SEQ ID NO. 26. In some embodiments, the siRNA molecule described herein comprises a sense strand having a sequence of SEQ ID NO. 12 and an antisense strand having a sequence of SEQ ID NO. 27. In some embodiments, the siRNA molecule described herein comprises a sense strand having a sequence of SEQ ID NO. 13 and an antisense strand having a sequence of SEQ ID NO. 28. In some embodiments, the siRNA molecule described herein comprises a sense strand having a sequence of SEQ ID NO. 14 and an antisense strand having a sequence of SEQ ID NO. 29. In some embodiments, the siRNA molecule described herein comprises a sense strand having a sequence of SEQ ID NO. 15 and an antisense strand having a sequence of SEQ ID NO. 30.

TABLE 1
Sense and antisense sequences of siRNA molecules

| | Sense strand | Antisense strand |
|---|---|---|
| Duplex ID | sequence (5′-3′) | sequence (5′-3′) |
| SR612 | AGAUCAAGGCUCACUUAUG | CAUAAGUGAGCCUUGAUCUUG |
| | (SEQ ID NO. 1) | (SEQ ID NO. 16) |
| SR670 | UCAGCAUUGUGAUGACCAC | GUGGUCAUCACAAUGCUGAGG |
| | (SEQ ID NO. 2) | (SEQ ID NO. 17) |
| SR710 | UCAUCAUUCUCUUGUGCAG | CUGCACAAGAGAAUGAUGAUC |
| | (SEQ ID NO. 3) | (SEQ ID NO. 18) |
| SR412 | UGGCCGUCACAGUUCUCUC | GAGAGAACUGUGACGGCCACA |
| | (SEQ ID NO. 4) | (SEQ ID NO. 19) |
| SR508 | UGGUCCCAAAGCAAUUCUG | CAGAAUUGCUUUGGGACCAGA |
| | (SEQ ID NO. 5) | (SEQ ID NO. 20) |
| SR455 | UCCAGUACAUCUAUCAGAA | UUCUGAUAGAUGUACUGGAAA |
| | (SEQ ID NO. 6) | (SEQ ID NO. 21) |
| SR530 | CCAGUACAUCUAUCAGAAU | AUUCUGAUAGAUGUACUGGAA |
| | (SEQ ID NO. 7) | (SEQ ID NO. 22) |
| SR378 | AUCUAUCAGAAUCAUCAAG | CUUGAUGAUUCUGAUAGAUGU |
| | (SEQ ID NO. 8) | (SEQ ID NO. 23) |
| SR579 | AAGUCACUCAAUUCCUGAA | UUCAGGAAUUGAGUGACUUUA |
| | (SEQ ID NO. 9) | (SEQ ID NO. 24) |
| SR641 | CCUGAACUAAUCAAUAUAU | AUAUAUUGAUUAGUUCAGGAA |
| | (SEQ ID NO. 10) | (SEQ ID NO. 25) |
| SR417 | UGAACUAAUCAAUAUAUAU | AUAUAUAUUGAUUAGUUCAGG |
| | (SEQ ID NO. 11) | (SEQ ID NO. 26) |
| SR512 | UGGUUCUCAUUCCUUGCAC | GUGCAAGGAAUGAGAACCAGG |
| | (SEQ ID NO. 12) | (SEQ ID NO. 27) |
| SR497 | CUCAUUCCUUGCACCAUAG | CUAUGGUGCAAGGAAUGAGAA |
| | (SEQ ID NO. 13) | (SEQ ID NO. 28) |
| SR572 | UUGGCUUUCUGCUGGGUUA | UAACCCAGCAGAAAGCCAAUA |
| | (SEQ ID NO. 14) | (SEQ ID NO. 29) |
| SR677 | UCCUCUACAUGAUUUUCCA | UGGAAAAUCAUGUAGAGGAGG |
| | (SEQ ID NO. 15) | (SEQ ID NO. 30) |

[0116] In some embodiments, the siRNA molecule specific to SLC10A1 comprises at least one overhang at one end.

[0117] In some embodiments, the siRNA molecule specific to SLC10A1 comprises a sense strand having 19 nucleotides in length and an antisense strand having 21 nucleotide in length. The sense and antisense strands form a duplex of 19 base pairs.

[0118] In some embodiments, the last nucleotide of the sense strand of a siRNA molecule is modified as adenine (A). In some embodiments, the first nucleotide of the antisense strand of a siRNA molecule is modified as uracil (U).

[0119] As non-limiting examples, the siRNA molecule described herein comprises a sense strand having a sequence of SEQ ID NO. 31 and an antisense strand having a sequence of SEQ ID NO. 46. In some embodiments, the siRNA molecule described herein comprises a sense strand having a sequence of SEQ ID NO. 32 and an antisense strand having a sequence of SEQ ID NO. 47. In some embodiments, the siRNA molecule described herein comprises a sense strand having a sequence of SEQ ID NO. 33 and an antisense strand having a sequence of SEQ ID NO. 48. In some embodiments, the siRNA molecule described herein comprises a sense strand having a sequence of SEQ ID NO. 34 and an antisense strand having a sequence of SEQ ID NO. 49. In some embodiments, the siRNA molecule described herein comprises a sense strand having a sequence of SEQ ID NO. 35 and an antisense strand having a sequence of SEQ ID NO. 50. In some embodiments, the siRNA molecule described herein comprises a sense strand having a sequence of SEQ ID NO. 36 and an antisense strand having a sequence of SEQ ID NO. 51. In some embodiments, the siRNA molecule described herein comprises a sense strand having a sequence of SEQ ID NO. 37 and an antisense strand having a sequence of SEQ ID NO. 52. In some embodiments, the siRNA molecule described herein comprises a sense strand having a sequence of SEQ ID NO. 38 and an antisense strand having a sequence of SEQ ID NO. 53. In some embodiments, the siRNA molecule described herein comprises a sense strand having a sequence of SEQ ID NO. 39 and an antisense strand having a sequence of SEQ ID NO. 54. In some embodiments, the siRNA molecule described herein comprises a sense strand having a sequence of SEQ ID NO. 40 and an antisense strand having a sequence of SEQ ID NO. 55. In some embodiments, the siRNA molecule described herein comprises a sense strand having a sequence of SEQ ID NO. 41 and an antisense strand having a sequence of SEQ ID NO. 56. In some embodiments, the siRNA molecule described herein comprises a sense strand having a sequence of SEQ ID NO. 42 and an antisense strand having a sequence of SEQ ID NO. 57. In some embodiments, the siRNA molecule described herein comprises a sense strand having a sequence of SEQ ID NO. 43 and an antisense strand having a sequence of SEQ ID NO. 58. In some embodiments, the siRNA molecule described herein comprises a sense strand having a sequence of SEQ ID NO. 44 and an antisense strand having a sequence of SEQ ID NO. 59. In some embodiments, the siRNA molecule described herein comprises a sense strand having a sequence of SEQ ID NO. 45 and an antisense strand having a sequence of SEQ ID NO. 60.

TABLE 2
Modified sense strand sequences and
antisense strand sequences of siRNAs

| | Sense strand | Antisense strand |
|---|---|---|
| | sequence (5′-3′) | sequence (5′-3′) |
| ID | (Position 19 = A) | (Position 1 = U) |
| SR387 | AGAUCAAGGCUCACUUAUA | UAUAAGUGAGCCUUGAUCUUG |
| | (SEQ ID NO. 31) | (SEQ ID NO. 46) |
| SR401 | UCAGCAUUGUGAUGACCAA | UUGGUCAUCACAAUGCUGAGG |
| | (SEQ ID NO. 32) | (SEQ ID NO. 47) |
| SR461 | UCAUCAUUCUCUUGUGCAA | UUGCACAAGAGAAUGAUGAUC |
| | (SEQ ID NO. 33) | (SEQ ID NO. 48) |
| SR413 | UGGCCGUCACAGUUCUCUA | UAGAGAACUGUGACGGCCACA |
| | (SEQ ID NO. 34) | (SEQ ID NO. 49) |
| SR509 | UGGUCCCAAAGCAAUUCUA | UAGAAUUGCUUUGGGACCAGA |
| | (SEQ ID NO. 35) | (SEQ ID NO. 50) |
| SR455 | UCCAGUACAUCUAUCAGAA | UUCUGAUAGAUGUACUGGAAA |
| | (SEQ ID NO. 36) | (SEQ ID NO. 51) |
| SR573 | CCAGUACAUCUAUCAGAAA | UUUCUGAUAGAUGUACUGGAA |
| | (SEQ ID NO. 37) | (SEQ ID NO. 52) |
| SR689 | AUCUAUCAGAAUCAUCAAA | UUUGAUGAUUCUGAUAGAUGU |
| | (SEQ ID NO. 38) | (SEQ ID NO. 53) |
| SR579 | AAGUCACUCAAUUCCUGAA | UUCAGGAAUUGAGUGACUUUA |
| | (SEQ ID NO. 39) | (SEQ ID NO. 54) |
| SR541 | CCUGAACUAAUCAAUAUAA | UUAUAUUGAUUAGUUCAGGAA |
| | (SEQ ID NO. 40) | (SEQ ID NO. 55) |
| SR403 | UGAACUAAUCAAUAUAUAA | UUAUAUAUUGAUUAGUUCAGG |
| | (SEQ ID NO. 41) | (SEQ ID NO. 56) |
| SR555 | UGGUUCUCAUUCCUUGCAA | UUGCAAGGAAUGAGAACCAGG |
| | (SEQ ID NO. 42) | (SEQ ID NO. 57) |
| SR457 | CUCAUUCCUUGCACCAUAA | UUAUGGUGCAAGGAAUGAGAA |
| | (SEQ ID NO. 43) | (SEQ ID NO. 58) |
| SR572 | UUGGCUUUCUGCUGGGUUA | UAACCCAGCAGAAAGCCAAUA |
| | (SEQ ID NO. 44) | (SEQ ID NO. 59) |
| SR677 | UCCUCUACAUGAUUUUCCA | UGGAAAAUCAUGUAGAGGAGG |
| | (SEQ ID NO. 45) | (SEQ ID NO. 60) |

[0120] In some embodiments, the siRNA molecule specific to SLC10A1 comprises a sense strand having 21 nucleotides in length and an antisense strand having 23 nucleotide in length. The sense and antisense strands form a duplex of 21 base pairs.

[0121] Nucleotides of a nucleic acid sequence can be chemically modified. In some embodiments of the present disclosure, a siRNA targeting a SLC10A1 mRNA transcript comprises at least one chemical modification. In some embodiments, the sense strand of a siRNA molecule described herein comprises at least one modification. In some embodiments, the antisense strand of a siRNA molecule described herein comprises at least one modification. In some embodiments, the sense strand and the antisense strand of a siRNA molecule described herein comprise at least one modification.

[0122] In some embodiments, the sense strand comprises 1, 2, 3, 4, 5, 6, 7, 8, 9, 10, 11, 12, 13, 14, 15, 16, 17, 18, 19, 20, or 21 modified nucleosides. In some embodiments, the antisense strand comprises 1, 2, 3, 4, 5, 6, 7, 8, 9, 10, 11, 12, 13, 14, 15, 16, 17, 18, 19, 20, 21 or 23 modified nucleosides. In some embodiments, the siRNA molecule described herein comprises a range of nucleosides defined by any two of the aforementioned numbers. In some embodiments, the siRNA molecule described herein comprises no more than 19 modified nucleosides. In some embodiments, the siRNA molecule described herein comprises no more than 21 modified nucleosides. In some embodiments, the siRNA molecule comprises 2 or more modified nucleosides, 3 or more modified nucleosides, 4 or more modified nucleosides, 5 or more modified nucleosides, 6 or more modified nucleosides, 7 or more modified nucleosides, 8 or more modified nucleosides, 9 or more modified nucleosides, 10 or more modified nucleosides, 11 or more modified nucleosides, 12 or more modified nucleosides, 13 or more modified nucleosides, 14 or more modified nucleosides, 15 or more modified nucleosides, 16 or more modified nucleosides, 17 or more modified nucleosides, 18 or more modified nucleosides, 19 or more modified nucleosides, 20 or more modified nucleosides, 21 or more modified nucleosides, 22 or more modified nucleosides, or 23 or more modified nucleosides.

[0123] Chemically modified nucleotides comprise but are not limited to 2′-O-methyl, 2′-methoxyethyl, 2′-O-alkyl, 2′-O-allyl, 2′-O-allyl, 2′-fluoro, or 2′-deoxy modified nucleotides, or a combination thereof. In some embodiments, the modified nucleotide comprises a 2′-O-methyl nucleotide, 2′-deoxyfluoro nucleotide, 2′-O—N-methylacetamido (2′-O-NMA) nucleotide, a 2′-O-dimethylaminocthoxyethyl (2′-O-DMAEOE) nucleotide, 2′-O-aminopropyl (2′-O-AP) nucleotide, 2′-fluoro nucleotide, or 2′-ara-F, or a combination thereof. In some embodiments, the modified nucleotide comprises one or more 2′-O-methyl modified nucleotides. In some embodiments, the modified nucleotide comprises one or more 2′-fluoro modified nucleotides. In some embodiments, the modified nucleotides comprise one or more 2′-O-methyl modified nucleotides and one or more 2′-fluoro modified nucleotides.

[0124] In some embodiments, one or more nucleotides in the sense and/or antisense strand of a siRNA molecule are modified. In some cases, every nucleotide in the sense strand and antisense strand of the siRNA molecule is modified. The modifications on sense strand and antisense strand may each independently comprise at least two different modifications. In some embodiments, not every nucleotide in the sense and antisense strand is modified. In some embodiments, no nucleotide in the sense and/or antisense strand is modified. In some embodiments, the sense strand of the siRNA molecule comprises a modification pattern as described herein. In some embodiments, the antisense strand of the siRNA molecule comprises a modification pattern as described herein. In some embodiments, the sense and antisense strands of the siRNA molecule comprise modification patterns as described herein.

[0125] In some embodiments, the sense strand of the siRNA molecule comprises a modification pattern in Table 3. In another example, the antisense strand of the siRNA molecule comprises a modification pattern in Table 3. In some embodiments, the siRNA molecule comprises a modified sense strand sequence of any one of SEQ ID NOs. 61-270. In some embodiments, the siRNA molecule comprises a modified antisense strand sequence of any one of SEQ ID NOs. 271-480.

[0126] In some embodiments, the siRNA molecule comprises a modified sense strand sequence of SEQ ID NO. 61 and a modified antisense strand sequence of SEQ ID NO. 271. In some embodiments, the siRNA molecule comprises a modified sense strand sequence of SEQ ID NO. 62 and a modified antisense strand sequence of SEQ ID NO. 272. In some embodiments, the siRNA molecule comprises a modified sense strand sequence of SEQ ID NO. 63 and a modified antisense strand sequence of SEQ ID NO. 273. In some embodiments, the siRNA molecule comprises a modified sense strand sequence of SEQ ID NO. 64 and a modified antisense strand sequence of SEQ ID NO. 274. In some embodiments, the siRNA molecule comprises a modified sense strand sequence of SEQ ID NO. 65 and a modified antisense strand sequence of SEQ ID NO. 275. In some embodiments, the siRNA molecule comprises a modified sense strand sequence of SEQ ID NO. 66 and a modified antisense strand sequence of SEQ ID NO. 276. In some embodiments, the siRNA molecule comprises a modified sense strand sequence of SEQ ID NO. 67 and a modified antisense strand sequence of SEQ ID NO. 277. In some embodiments, the siRNA molecule comprises a modified sense strand sequence of SEQ ID NO. 68 and a modified antisense strand sequence of SEQ ID NO. 278. In some embodiments, the siRNA molecule comprises a modified sense strand sequence of SEQ ID NO. 69 and a modified antisense strand sequence of SEQ ID NO. 279. In some embodiments, the siRNA molecule comprises a modified sense strand sequence of SEQ ID NO. 70 and a modified antisense strand sequence of SEQ ID NO. 280. In some embodiments, the siRNA molecule comprises a modified sense strand sequence of SEQ ID NO. 71 and a modified antisense strand sequence of SEQ ID NO. 281. In some embodiments, the siRNA molecule comprises a modified sense strand sequence of SEQ ID NO. 72 and a modified antisense strand sequence of SEQ ID NO. 282. In some embodiments, the siRNA molecule comprises a modified sense strand sequence of SEQ ID NO. 73 and a modified antisense strand sequence of SEQ ID NO. 283. In some embodiments, the siRNA molecule comprises a modified sense strand sequence of SEQ ID NO. 74 and a modified antisense strand sequence of SEQ ID NO. 284. In some embodiments, the siRNA molecule comprises a modified sense strand sequence of SEQ ID NO. 75 and a modified antisense strand sequence of SEQ ID NO. 285. In some embodiments, the siRNA molecule comprises a modified sense strand sequence of SEQ ID NO. 76 and a modified antisense strand sequence of SEQ ID NO. 286. In some embodiments, the siRNA molecule comprises a modified sense strand sequence of SEQ ID NO. 77 and a modified antisense strand sequence of SEQ ID NO. 287. In some embodiments, the siRNA molecule comprises a modified sense strand sequence of SEQ ID NO. 78 and a modified antisense strand sequence of SEQ ID NO. 288. In some embodiments, the siRNA molecule comprises a modified sense strand sequence of SEQ ID NO. 79 and a modified antisense strand sequence of SEQ ID NO. 289. In some embodiments, the siRNA molecule comprises a modified sense strand sequence of SEQ ID NO. 80 and a modified antisense strand sequence of SEQ ID NO. 290. In some embodiments, the siRNA molecule comprises a modified sense strand sequence of SEQ ID NO. 81 and a modified antisense strand sequence of SEQ ID NO. 291. In some embodiments, the siRNA molecule comprises a modified sense strand sequence of SEQ ID NO. 82 and a modified antisense strand sequence of SEQ ID NO. 292. In some embodiments, the siRNA molecule comprises a modified sense strand sequence of SEQ ID NO. 83 and a modified antisense strand sequence of SEQ ID NO. 293. In some embodiments, the siRNA molecule comprises a modified sense strand sequence of SEQ ID NO. 84 and a modified antisense strand sequence of SEQ ID NO. 294. In some embodiments, the siRNA molecule comprises a modified sense strand sequence of SEQ ID NO. 85 and a modified antisense strand sequence of SEQ ID NO. 295. In some embodiments, the siRNA molecule comprises a modified sense strand sequence of SEQ ID NO. 86 and a modified antisense strand sequence of SEQ ID NO. 296. In some embodiments, the siRNA molecule comprises a modified sense strand sequence of SEQ ID NO. 87 and a modified antisense strand sequence of SEQ ID NO. 297. In some embodiments, the siRNA molecule comprises a modified sense strand sequence of SEQ ID NO. 88 and a modified antisense strand sequence of SEQ ID NO. 298. In some embodiments, the siRNA molecule comprises a modified sense strand sequence of SEQ ID NO. 89 and a modified antisense strand sequence of SEQ ID NO. 299. In some embodiments, the siRNA molecule comprises a modified sense strand sequence of SEQ ID NO. 90 and a modified antisense strand sequence of SEQ ID NO. 300. In some embodiments, the siRNA molecule comprises a modified sense strand sequence of SEQ ID NO. 91 and a modified antisense strand sequence of SEQ ID NO. 301. In some embodiments, the siRNA molecule comprises a modified sense strand sequence of SEQ ID NO. 92 and a modified antisense strand sequence of SEQ ID NO. 302. In some embodiments, the siRNA molecule comprises a modified sense strand sequence of SEQ ID NO. 93 and a modified antisense strand sequence of SEQ ID NO. 303. In some embodiments, the siRNA molecule comprises a modified sense strand sequence of SEQ ID NO. 94 and a modified antisense strand sequence of SEQ ID NO. 304. In some embodiments, the siRNA molecule comprises a modified sense strand sequence of SEQ ID NO. 95 and a modified antisense strand sequence of SEQ ID NO. 305. In some embodiments, the siRNA molecule comprises a modified sense strand sequence of SEQ ID NO. 96 and a modified antisense strand sequence of SEQ ID NO. 306. In some embodiments, the siRNA molecule comprises a modified sense strand sequence of SEQ ID NO. 97 and a modified antisense strand sequence of SEQ ID NO. 307. In some embodiments, the siRNA molecule comprises a modified sense strand sequence of SEQ ID NO. 98 and a modified antisense strand sequence of SEQ ID NO. 308. In some embodiments, the siRNA molecule comprises a modified sense strand sequence of SEQ ID NO. 99 and a modified antisense strand sequence of SEQ ID NO. 309. In some embodiments, the siRNA molecule comprises a modified sense strand sequence of SEQ ID NO. 100 and a modified antisense strand sequence of SEQ ID NO. 310. In some embodiments, the siRNA molecule comprises a modified sense strand sequence of SEQ ID NO. 101 and a modified antisense strand sequence of SEQ ID NO. 311. In some embodiments, the siRNA molecule comprises a modified sense strand sequence of SEQ ID NO. 102 and a modified antisense strand sequence of SEQ ID NO. 312. In some embodiments, the siRNA molecule comprises a modified sense strand sequence of SEQ ID NO. 103 and a modified antisense strand sequence of SEQ ID NO. 313. In some embodiments, the siRNA molecule comprises a modified sense strand sequence of SEQ ID NO. 104 and a modified antisense strand sequence of SEQ ID NO. 314. In some embodiments, the siRNA molecule comprises a modified sense strand sequence of SEQ ID NO. 105 and a modified antisense strand sequence of SEQ ID NO. 315. In some embodiments, the siRNA molecule comprises a modified sense strand sequence of SEQ ID NO. 106 and a modified antisense strand sequence of SEQ ID NO. 316. In some embodiments, the siRNA molecule comprises a modified sense strand sequence of SEQ ID NO. 107 and a modified antisense strand sequence of SEQ ID NO. 317. In some embodiments, the siRNA molecule comprises a modified sense strand sequence of SEQ ID NO. 108 and a modified antisense strand sequence of SEQ ID NO. 318. In some embodiments, the siRNA molecule comprises a modified sense strand sequence of SEQ ID NO. 109 and a modified antisense strand sequence of SEQ ID NO. 319. In some embodiments, the siRNA molecule comprises a modified sense strand sequence of SEQ ID NO. 110 and a modified antisense strand sequence of SEQ ID NO. 320. In some embodiments, the siRNA molecule comprises a modified sense strand sequence of SEQ ID NO. 111 and a modified antisense strand sequence of SEQ ID NO. 321. In some embodiments, the siRNA molecule comprises a modified sense strand sequence of SEQ ID NO. 112 and a modified antisense strand sequence of SEQ ID NO. 322. In some embodiments, the siRNA molecule comprises a modified sense strand sequence of SEQ ID NO. 113 and a modified antisense strand sequence of SEQ ID NO. 323. In some embodiments, the siRNA molecule comprises a modified sense strand sequence of SEQ ID NO. 114 and a modified antisense strand sequence of SEQ ID NO. 324. In some embodiments, the siRNA molecule comprises a modified sense strand sequence of SEQ ID NO. 115 and a modified antisense strand sequence of SEQ ID NO. 325. In some embodiments, the siRNA molecule comprises a modified sense strand sequence of SEQ ID NO. 116 and a modified antisense strand sequence of SEQ ID NO. 326. In some embodiments, the siRNA molecule comprises a modified sense strand sequence of SEQ ID NO. 117 and a modified antisense strand sequence of SEQ ID NO. 327. In some embodiments, the siRNA molecule comprises a modified sense strand sequence of SEQ ID NO. 118 and a modified antisense strand sequence of SEQ ID NO. 328. In some embodiments, the siRNA molecule comprises a modified sense strand sequence of SEQ ID NO. 119 and a modified antisense strand sequence of SEQ ID NO. 329. In some embodiments, the siRNA molecule comprises a modified sense strand sequence of SEQ ID NO. 120 and a modified antisense strand sequence of SEQ ID NO. 330. In some embodiments, the siRNA molecule comprises a modified sense strand sequence of SEQ ID NO. 121 and a modified antisense strand sequence of SEQ ID NO. 331. In some embodiments, the siRNA molecule comprises a modified sense strand sequence of SEQ ID NO. 122 and a modified antisense strand sequence of SEQ ID NO. 332. In some embodiments, the siRNA molecule comprises a modified sense strand sequence of SEQ ID NO. 123 and a modified antisense strand sequence of SEQ ID NO. 333. In some embodiments, the siRNA molecule comprises a modified sense strand sequence of SEQ ID NO. 124 and a modified antisense strand sequence of SEQ ID NO. 334. In some embodiments, the siRNA molecule comprises a modified sense strand sequence of SEQ ID NO. 125 and a modified antisense strand sequence of SEQ ID NO. 335. In some embodiments, the siRNA molecule comprises a modified sense strand sequence of SEQ ID NO. 126 and a modified antisense strand sequence of SEQ ID NO. 336. In some embodiments, the siRNA molecule comprises a modified sense strand sequence of SEQ ID NO. 127 and a modified antisense strand sequence of SEQ ID NO. 337. In some embodiments, the siRNA molecule comprises a modified sense strand sequence of SEQ ID NO. 128 and a modified antisense strand sequence of SEQ ID NO. 338. In some embodiments, the siRNA molecule comprises a modified sense strand sequence of SEQ ID NO. 129 and a modified antisense strand sequence of SEQ ID NO. 339. In some embodiments, the siRNA molecule comprises a modified sense strand sequence of SEQ ID NO. 130 and a modified antisense strand sequence of SEQ ID NO. 340. In some embodiments, the siRNA molecule comprises a modified sense strand sequence of SEQ ID NO. 131 and a modified antisense strand sequence of SEQ ID NO. 341. In some embodiments, the siRNA molecule comprises a modified sense strand sequence of SEQ ID NO. 132 and a modified antisense strand sequence of SEQ ID NO. 342. In some embodiments, the siRNA molecule comprises a modified sense strand sequence of SEQ ID NO. 133 and a modified antisense strand sequence of SEQ ID NO. 343. In some embodiments, the siRNA molecule comprises a modified sense strand sequence of SEQ ID NO. 134 and a modified antisense strand sequence of SEQ ID NO. 344. In some embodiments, the siRNA molecule comprises a modified sense strand sequence of SEQ ID NO. 135 and a modified antisense strand sequence of SEQ ID NO. 345. In some embodiments, the siRNA molecule comprises a modified sense strand sequence of SEQ ID NO. 136 and a modified antisense strand sequence of SEQ ID NO. 346. In some embodiments, the siRNA molecule comprises a modified sense strand sequence of SEQ ID NO. 137 and a modified antisense strand sequence of SEQ ID NO. 347. In some embodiments, the siRNA molecule comprises a modified sense strand sequence of SEQ ID NO. 138 and a modified antisense strand sequence of SEQ ID NO. 348. In some embodiments, the siRNA molecule comprises a modified sense strand sequence of SEQ ID NO. 139 and a modified antisense strand sequence of SEQ ID NO. 349. In some embodiments, the siRNA molecule comprises a modified sense strand sequence of SEQ ID NO. 140 and a modified antisense strand sequence of SEQ ID NO. 350. In some embodiments, the siRNA molecule comprises a modified sense strand sequence of SEQ ID NO. 141 and a modified antisense strand sequence of SEQ ID NO. 351. In some embodiments, the siRNA molecule comprises a modified sense strand sequence of SEQ ID NO. 142 and a modified antisense strand sequence of SEQ ID NO. 352. In some embodiments, the siRNA molecule comprises a modified sense strand sequence of SEQ ID NO. 143 and a modified antisense strand sequence of SEQ ID NO. 353. In some embodiments, the siRNA molecule comprises a modified sense strand sequence of SEQ ID NO. 144 and a modified antisense strand sequence of SEQ ID NO. 354. In some embodiments, the siRNA molecule comprises a modified sense strand sequence of SEQ ID NO. 145 and a modified antisense strand sequence of SEQ ID NO. 355. In some embodiments, the siRNA molecule comprises a modified sense strand sequence of SEQ ID NO. 146 and a modified antisense strand sequence of SEQ ID NO. 356. In some embodiments, the siRNA molecule comprises a modified sense strand sequence of SEQ ID NO. 147 and a modified antisense strand sequence of SEQ ID NO. 357. In some embodiments, the siRNA molecule comprises a modified sense strand sequence of SEQ ID NO. 148 and a modified antisense strand sequence of SEQ ID NO. 358. In some embodiments, the siRNA molecule comprises a modified sense strand sequence of SEQ ID NO. 149 and a modified antisense strand sequence of SEQ ID NO. 359. In some embodiments, the siRNA molecule comprises a modified sense strand sequence of SEQ ID NO. 150 and a modified antisense strand sequence of SEQ ID NO. 360. In some embodiments, the siRNA molecule comprises a modified sense strand sequence of SEQ ID NO. 151 and a modified antisense strand sequence of SEQ ID NO. 361. In some embodiments, the siRNA molecule comprises a modified sense strand sequence of SEQ ID NO. 152 and a modified antisense strand sequence of SEQ ID NO. 362. In some embodiments, the siRNA molecule comprises a modified sense strand sequence of SEQ ID NO. 153 and a modified antisense strand sequence of SEQ ID NO. 363. In some embodiments, the siRNA molecule comprises a modified sense strand sequence of SEQ ID NO. 154 and a modified antisense strand sequence of SEQ ID NO. 364. In some embodiments, the siRNA molecule comprises a modified sense strand sequence of SEQ ID NO. 155 and a modified antisense strand sequence of SEQ ID NO. 365. In some embodiments, the siRNA molecule comprises a modified sense strand sequence of SEQ ID NO. 156 and a modified antisense strand sequence of SEQ ID NO. 366. In some embodiments, the siRNA molecule comprises a modified sense strand sequence of SEQ ID NO. 157 and a modified antisense strand sequence of SEQ ID NO. 367. In some embodiments, the siRNA molecule comprises a modified sense strand sequence of SEQ ID NO. 158 and a modified antisense strand sequence of SEQ ID NO. 368. In some embodiments, the siRNA molecule comprises a modified sense strand sequence of SEQ ID NO. 159 and a modified antisense strand sequence of SEQ ID NO. 369. In some embodiments, the siRNA molecule comprises a modified sense strand sequence of SEQ ID NO. 160 and a modified antisense strand sequence of SEQ ID NO. 370. In some embodiments, the siRNA molecule comprises a modified sense strand sequence of SEQ ID NO. 161 and a modified antisense strand sequence of SEQ ID NO. 371. In some embodiments, the siRNA molecule comprises a modified sense strand sequence of SEQ ID NO. 162 and a modified antisense strand sequence of SEQ ID NO. 372. In some embodiments, the siRNA molecule comprises a modified sense strand sequence of SEQ ID NO. 163 and a modified antisense strand sequence of SEQ ID NO. 373. In some embodiments, the siRNA molecule comprises a modified sense strand sequence of SEQ ID NO. 164 and a modified antisense strand sequence of SEQ ID NO. 374. In some embodiments, the siRNA molecule comprises a modified sense strand sequence of SEQ ID NO. 165 and a modified antisense strand sequence of SEQ ID NO. 375. In some embodiments, the siRNA molecule comprises a modified sense strand sequence of SEQ ID NO. 166 and a modified antisense strand sequence of SEQ ID NO. 376. In some embodiments, the siRNA molecule comprises a modified sense strand sequence of SEQ ID NO. 167 and a modified antisense strand sequence of SEQ ID NO. 377. In some embodiments, the siRNA molecule comprises a modified sense strand sequence of SEQ ID NO. 168 and a modified antisense strand sequence of SEQ ID NO. 378. In some embodiments, the siRNA molecule comprises a modified sense strand sequence of SEQ ID NO. 169 and a modified antisense strand sequence of SEQ ID NO. 379. In some embodiments, the siRNA molecule comprises a modified sense strand sequence of SEQ ID NO. 170 and a modified antisense strand sequence of SEQ ID NO. 380. In some embodiments, the siRNA molecule comprises a modified sense strand sequence of SEQ ID NO. 171 and a modified antisense strand sequence of SEQ ID NO. 381. In some embodiments, the siRNA molecule comprises a modified sense strand sequence of SEQ ID NO. 172 and a modified antisense strand sequence of SEQ ID NO. 382. In some embodiments, the siRNA molecule comprises a modified sense strand sequence of SEQ ID NO. 173 and a modified antisense strand sequence of SEQ ID NO. 383. In some embodiments, the siRNA molecule comprises a modified sense strand sequence of SEQ ID NO. 174 and a modified antisense strand sequence of SEQ ID NO. 384. In some embodiments, the siRNA molecule comprises a modified sense strand sequence of SEQ ID NO. 175 and a modified antisense strand sequence of SEQ ID NO. 385. In some embodiments, the siRNA molecule comprises a modified sense strand sequence of SEQ ID NO. 176 and a modified antisense strand sequence of SEQ ID NO. 386. In some embodiments, the siRNA molecule comprises a modified sense strand sequence of SEQ ID NO. 177 and a modified antisense strand sequence of SEQ ID NO. 387. In some embodiments, the siRNA molecule comprises a modified sense strand sequence of SEQ ID NO. 178 and a modified antisense strand sequence of SEQ ID NO. 388. In some embodiments, the siRNA molecule comprises a modified sense strand sequence of SEQ ID NO. 179 and a modified antisense strand sequence of SEQ ID NO. 389. In some embodiments, the siRNA molecule comprises a modified sense strand sequence of SEQ ID NO. 180 and a modified antisense strand sequence of SEQ ID NO. 390. In some embodiments, the siRNA molecule comprises a modified sense strand sequence of SEQ ID NO. 181 and a modified antisense strand sequence of SEQ ID NO. 391. In some embodiments, the siRNA molecule comprises a modified sense strand sequence of SEQ ID NO. 182 and a modified antisense strand sequence of SEQ ID NO. 392. In some embodiments, the siRNA molecule comprises a modified sense strand sequence of SEQ ID NO. 183 and a modified antisense strand sequence of SEQ ID NO. 393. In some embodiments, the siRNA molecule comprises a modified sense strand sequence of SEQ ID NO. 184 and a modified antisense strand sequence of SEQ ID NO. 394. In some embodiments, the siRNA molecule comprises a modified sense strand sequence of SEQ ID NO. 185 and a modified antisense strand sequence of SEQ ID NO. 395. In some embodiments, the siRNA molecule comprises a modified sense strand sequence of SEQ ID NO. 186 and a modified antisense strand sequence of SEQ ID NO. 396. In some embodiments, the siRNA molecule comprises a modified sense strand sequence of SEQ ID NO. 187 and a modified antisense strand sequence of SEQ ID NO. 397. In some embodiments, the siRNA molecule comprises a modified sense strand sequence of SEQ ID NO. 188 and a modified antisense strand sequence of SEQ ID NO. 398. In some embodiments, the siRNA molecule comprises a modified sense strand sequence of SEQ ID NO. 189 and a modified antisense strand sequence of SEQ ID NO. 399. In some embodiments, the siRNA molecule comprises a modified sense strand sequence of SEQ ID NO. 190 and a modified antisense strand sequence of SEQ ID NO. 400. In some embodiments, the siRNA molecule comprises a modified sense strand sequence of SEQ ID NO. 191 and a modified antisense strand sequence of SEQ ID NO. 401. In some embodiments, the siRNA molecule comprises a modified sense strand sequence of SEQ ID NO. 192 and a modified antisense strand sequence of SEQ ID NO. 402. In some embodiments, the siRNA molecule comprises a modified sense strand sequence of SEQ ID NO. 193 and a modified antisense strand sequence of SEQ ID NO. 403. In some embodiments, the siRNA molecule comprises a modified sense strand sequence of SEQ ID NO. 194 and a modified antisense strand sequence of SEQ ID NO. 404. In some embodiments, the siRNA molecule comprises a modified sense strand sequence of SEQ ID NO. 195 and a modified antisense strand sequence of SEQ ID NO. 405. In some embodiments, the siRNA molecule comprises a modified sense strand sequence of SEQ ID NO. 196 and a modified antisense strand sequence of SEQ ID NO. 406. In some embodiments, the siRNA molecule comprises a modified sense strand sequence of SEQ ID NO. 197 and a modified antisense strand sequence of SEQ ID NO. 407. In some embodiments, the siRNA molecule comprises a modified sense strand sequence of SEQ ID NO. 198 and a modified antisense strand sequence of SEQ ID NO. 408. In some embodiments, the siRNA molecule comprises a modified sense strand sequence of SEQ ID NO. 199 and a modified antisense strand sequence of SEQ ID NO. 409. In some embodiments, the siRNA molecule comprises a modified sense strand sequence of SEQ ID NO. 200 and a modified antisense strand sequence of SEQ ID NO. 410. In some embodiments, the siRNA molecule comprises a modified sense strand sequence of SEQ ID NO. 201 and a modified antisense strand sequence of SEQ ID NO. 411. In some embodiments, the siRNA molecule comprises a modified sense strand sequence of SEQ ID NO. 202 and a modified antisense strand sequence of SEQ ID NO. 412. In some embodiments, the siRNA molecule comprises a modified sense strand sequence of SEQ ID NO. 203 and a modified antisense strand sequence of SEQ ID NO. 413. In some embodiments, the siRNA molecule comprises a modified sense strand sequence of SEQ ID NO. 204 and a modified antisense strand sequence of SEQ ID NO. 414. In some embodiments, the siRNA molecule comprises a modified sense strand sequence of SEQ ID NO. 205 and a modified antisense strand sequence of SEQ ID NO. 415. In some embodiments, the siRNA molecule comprises a modified sense strand sequence of SEQ ID NO. 206 and a modified antisense strand sequence of SEQ ID NO. 416. In some embodiments, the siRNA molecule comprises a modified sense strand sequence of SEQ ID NO. 207 and a modified antisense strand sequence of SEQ ID NO. 417. In some embodiments, the siRNA molecule comprises a modified sense strand sequence of SEQ ID NO. 208 and a modified antisense strand sequence of SEQ ID NO. 418. In some embodiments, the siRNA molecule comprises a modified sense strand sequence of SEQ ID NO. 209 and a modified antisense strand sequence of SEQ ID NO. 419. In some embodiments, the siRNA molecule comprises a modified sense strand sequence of SEQ ID NO. 210 and a modified antisense strand sequence of SEQ ID NO. 420. In some embodiments, the siRNA molecule comprises a modified sense strand sequence of SEQ ID NO. 211 and a modified antisense strand sequence of SEQ ID NO. 421. In some embodiments, the siRNA molecule comprises a modified sense strand sequence of SEQ ID NO. 212 and a modified antisense strand sequence of SEQ ID NO. 422. In some embodiments, the siRNA molecule comprises a modified sense strand sequence of SEQ ID NO. 213 and a modified antisense strand sequence of SEQ ID NO. 423. In some embodiments, the siRNA molecule comprises a modified sense strand sequence of SEQ ID NO. 214 and a modified antisense strand sequence of SEQ ID NO. 424. In some embodiments, the siRNA molecule comprises a modified sense strand sequence of SEQ ID NO. 215 and a modified antisense strand sequence of SEQ ID NO. 425. In some embodiments, the siRNA molecule comprises a modified sense strand sequence of SEQ ID NO. 216 and a modified antisense strand sequence of SEQ ID NO. 426. In some embodiments, the siRNA molecule comprises a modified sense strand sequence of SEQ ID NO. 217 and a modified antisense strand sequence of SEQ ID NO. 427. In some embodiments, the siRNA molecule comprises a modified sense strand sequence of SEQ ID NO. 218 and a modified antisense strand sequence of SEQ ID NO. 428. In some embodiments, the siRNA molecule comprises a modified sense strand sequence of SEQ ID NO. 219 and a modified antisense strand sequence of SEQ ID NO. 429. In some embodiments, the siRNA molecule comprises a modified sense strand sequence of SEQ ID NO. 220 and a modified antisense strand sequence of SEQ ID NO. 430. In some embodiments, the siRNA molecule comprises a modified sense strand sequence of SEQ ID NO. 221 and a modified antisense strand sequence of SEQ ID NO. 431. In some embodiments, the siRNA molecule comprises a modified sense strand sequence of SEQ ID NO. 222 and a modified antisense strand sequence of SEQ ID NO. 432. In some embodiments, the siRNA molecule comprises a modified sense strand sequence of SEQ ID NO. 223 and a modified antisense strand sequence of SEQ ID NO. 433. In some embodiments, the siRNA molecule comprises a modified sense strand sequence of SEQ ID NO. 224 and a modified antisense strand sequence of SEQ ID NO. 434. In some embodiments, the siRNA molecule comprises a modified sense strand sequence of SEQ ID NO. 225 and a modified antisense strand sequence of SEQ ID NO. 435. In some embodiments, the siRNA molecule comprises a modified sense strand sequence of SEQ ID NO. 226 and a modified antisense strand sequence of SEQ ID NO. 436. In some embodiments, the siRNA molecule comprises a modified sense strand sequence of SEQ ID NO. 227 and a modified antisense strand sequence of SEQ ID NO. 437. In some embodiments, the siRNA molecule comprises a modified sense strand sequence of SEQ ID NO. 228 and a modified antisense strand sequence of SEQ ID NO. 438. In some embodiments, the siRNA molecule comprises a modified sense strand sequence of SEQ ID NO. 229 and a modified antisense strand sequence of SEQ ID NO. 439. In some embodiments, the siRNA molecule comprises a modified sense strand sequence of SEQ ID NO. 230 and a modified antisense strand sequence of SEQ ID NO. 440. In some embodiments, the siRNA molecule comprises a modified sense strand sequence of SEQ ID NO. 231 and a modified antisense strand sequence of SEQ ID NO. 441. In some embodiments, the siRNA molecule comprises a modified sense strand sequence of SEQ ID NO. 232 and a modified antisense strand sequence of SEQ ID NO. 442. In some embodiments, the siRNA molecule comprises a modified sense strand sequence of SEQ ID NO. 233 and a modified antisense strand sequence of SEQ ID NO. 443. In some embodiments, the siRNA molecule comprises a modified sense strand sequence of SEQ ID NO. 234 and a modified antisense strand sequence of SEQ ID NO. 444. In some embodiments, the siRNA molecule comprises a modified sense strand sequence of SEQ ID NO. 235 and a modified antisense strand sequence of SEQ ID NO. 445. In some embodiments, the siRNA molecule comprises a modified sense strand sequence of SEQ ID NO. 236 and a modified antisense strand sequence of SEQ ID NO. 446. In some embodiments, the siRNA molecule comprises a modified sense strand sequence of SEQ ID NO. 237 and a modified antisense strand sequence of SEQ ID NO. 447. In some embodiments, the siRNA molecule comprises a modified sense strand sequence of SEQ ID NO. 238 and a modified antisense strand sequence of SEQ ID NO. 448. In some embodiments, the siRNA molecule comprises a modified sense strand sequence of SEQ ID NO. 239 and a modified antisense strand sequence of SEQ ID NO. 449. In some embodiments, the siRNA molecule comprises a modified sense strand sequence of SEQ ID NO. 240 and a modified antisense strand sequence of SEQ ID NO. 450. In some embodiments, the siRNA molecule comprises a modified sense strand sequence of SEQ ID NO. 241 and a modified antisense strand sequence of SEQ ID NO. 451. In some embodiments, the siRNA molecule comprises a modified sense strand sequence of SEQ ID NO. 242 and a modified antisense strand sequence of SEQ ID NO. 452. In some embodiments, the siRNA molecule comprises a modified sense strand sequence of SEQ ID NO. 243 and a modified antisense strand sequence of SEQ ID NO. 453. In some embodiments, the siRNA molecule comprises a modified sense strand sequence of SEQ ID NO. 244 and a modified antisense strand sequence of SEQ ID NO. 454. In some embodiments, the siRNA molecule comprises a modified sense strand sequence of SEQ ID NO. 245 and a modified antisense strand sequence of SEQ ID NO. 455. In some embodiments, the siRNA molecule comprises a modified sense strand sequence of SEQ ID NO. 246 and a modified antisense strand sequence of SEQ ID NO. 456. In some embodiments, the siRNA molecule comprises a modified sense strand sequence of SEQ ID NO. 247 and a modified antisense strand sequence of SEQ ID NO. 457. In some embodiments, the siRNA molecule comprises a modified sense strand sequence of SEQ ID NO. 248 and a modified antisense strand sequence of SEQ ID NO. 458. In some embodiments, the siRNA molecule comprises a modified sense strand sequence of SEQ ID NO. 249 and a modified antisense strand sequence of SEQ ID NO. 459. In some embodiments, the siRNA molecule comprises a modified sense strand sequence of SEQ ID NO. 250 and a modified antisense strand sequence of SEQ ID NO. 460. In some embodiments, the siRNA molecule comprises a modified sense strand sequence of SEQ ID NO. 251 and a modified antisense strand sequence of SEQ ID NO. 461. In some embodiments, the siRNA molecule comprises a modified sense strand sequence of SEQ ID NO. 252 and a modified antisense strand sequence of SEQ ID NO. 462. In some embodiments, the siRNA molecule comprises a modified sense strand sequence of SEQ ID NO. 253 and a modified antisense strand sequence of SEQ ID NO. 463. In some embodiments, the siRNA molecule comprises a modified sense strand sequence of SEQ ID NO. 254 and a modified antisense strand sequence of SEQ ID NO. 464. In some embodiments, the siRNA molecule comprises a modified sense strand sequence of SEQ ID NO. 255 and a modified antisense strand sequence of SEQ ID NO. 465. In some embodiments, the siRNA molecule comprises a modified sense strand sequence of SEQ ID NO. 256 and a modified antisense strand sequence of SEQ ID NO. 466. In some embodiments, the siRNA molecule comprises a modified sense strand sequence of SEQ ID NO. 257 and a modified antisense strand sequence of SEQ ID NO. 467. In some embodiments, the siRNA molecule comprises a modified sense strand sequence of SEQ ID NO. 258 and a modified antisense strand sequence of SEQ ID NO. 468. In some embodiments, the siRNA molecule comprises a modified sense strand sequence of SEQ ID NO. 259 and a modified antisense strand sequence of SEQ ID NO. 469. In some embodiments, the siRNA molecule comprises a modified sense strand sequence of SEQ ID NO. 260 and a modified antisense strand sequence of SEQ ID NO. 470. In some embodiments, the siRNA molecule comprises a modified sense strand sequence of SEQ ID NO. 261 and a modified antisense strand sequence of SEQ ID NO. 471. In some embodiments, the siRNA molecule comprises a modified sense strand sequence of SEQ ID NO. 262 and a modified antisense strand sequence of SEQ ID NO. 472. In some embodiments, the siRNA molecule comprises a modified sense strand sequence of SEQ ID NO. 263 and a modified antisense strand sequence of SEQ ID NO. 473. In some embodiments, the siRNA molecule comprises a modified sense strand sequence of SEQ ID NO. 264 and a modified antisense strand sequence of SEQ ID NO. 474. In some embodiments, the siRNA molecule comprises a modified sense strand sequence of SEQ ID NO. 265 and a modified antisense strand sequence of SEQ ID NO. 475. In some embodiments, the siRNA molecule comprises a modified sense strand sequence of SEQ ID NO. 266 and a modified antisense strand sequence of SEQ ID NO. 476. In some embodiments, the siRNA molecule comprises a modified sense strand sequence of SEQ ID NO. 267 and a modified antisense strand sequence of SEQ ID NO. 477. In some embodiments, the siRNA molecule comprises a modified sense strand sequence of SEQ ID NO. 268 and a modified antisense strand sequence of SEQ ID NO. 478. In some embodiments, the siRNA molecule comprises a modified sense strand sequence of SEQ ID NO. 269 and a modified antisense strand sequence of SEQ ID NO. 479. In some embodiments, the siRNA molecule comprises a modified sense strand sequence of SEQ ID NO. 270 and a modified antisense strand sequence of SEQ ID NO. 480.

TABLE 3
Exemplary modified sense and antisense strand sequences of siRNAs

| | | GalN | |
|---|---|---|---|
| | | Ac at | |
| | | the 3′ | |
| | | end of | |
| Duplex | Sense (S) | the S | Antisense strand (AS) |
| ID | strand sequence (5′-3′) | strand | sequence (5′-3′) |
| SR271 | asgsauCfaAfGfGfcucacuuaua | L96 | usAfsuaaGfugagccuUfgAfucususg |
| SR442 | (SEQ ID NO. 61) | AWH | (SEQ ID NO. 271) |
| SR195 | uscsagCfaUfUfGfugaugaccaa | L96 | usUfsgguCfaucacaaUfgCfugasgsg |
| SR499 | (SEQ ID NO. 62) | AWH | (SEQ ID NO. 272) |
| SR240 | uscsauCfaUfUfCfucuugugcaa | L96 | usUfsgcaCfaagagaaUfgAfugasusc |
| SR364 | (SEQ ID NO. 63) | AWH | (SEQ ID NO. 273) |
| SR028 | usgsgcCfgUfCfAfcaguucucua | L96 | usAfsgagAfacugugaCfgGfccascsa |
| SR470 | (SEQ ID NO. 64) | AWH | (SEQ ID NO. 274) |
| SR167 | usgsguCfcCfAfAfagcaauucua | L96 | usAfsgaaUfugcuuugGfgAfccasgsa |
| SR651 | (SEQ ID NO. 65) | AWH | (SEQ ID NO. 275) |
| SR082 | uscscaGfuAfCfAfucuaucagaa | L96 | usUfscugAfuagauguAfcUfggasasa |
| SR597 | (SEQ ID NO. 66) | AWH | (SEQ ID NO. 276) |
| SR197 | cscsagUfaCfAfUfcuaucagaaa | L96 | usUfsucuGfauagaugUfaCfuggsasa |
| SR700 | (SEQ ID NO. 67) | AWH | (SEQ ID NO. 277) |
| SR158 | asuscuAfuCfAfGfaaucaucaaa | L96 | usUfsugaUfgauucugAfuAfgausgsu |
| SR402 | (SEQ ID NO. 68) | AWH | (SEQ ID NO. 278) |
| SR019 | asasguCfaCfUfCfaauuccugaa | L96 | usUfscagGfaauugagUfgAfcuususa |
| SR640 | (SEQ ID NO. 69) | AWH | (SEQ ID NO. 279) |
| SR237 | cscsugAfaCfUfAfaucaauauaa | L96 | usUfsauaUfugauuagUfuCfaggsasa |
| SR534 | (SEQ ID NO. 70) | AWH | (SEQ ID NO. 280) |
| SR259 | usgsaaCfuAfAfUfcaauauauaa | L96 | usUfsauaUfauugauuAfgUfucasgsg |
| SR376 | (SEQ ID NO. 71) | AWH | (SEQ ID NO. 281) |
| SR047 | usgsguUfcUfCfAfuuccuugcaa | L96 | usUfsgcaAfggaaugaGfaAfccasgsg |
| SR370 | (SEQ ID NO. 72) | AWH | (SEQ ID NO. 282) |
| SR159 | csuscaUfuCfCfUfugcaccauaa | L96 | usUfsaugGfugcaaggAfaUfgagsasa |
| SR474 | (SEQ ID NO. 73) | AWH | (SEQ ID NO. 283) |
| SR332 | ususggCfuUfUfCfugcuggguua | L96 | usAfsaccCfagcagaaAfgCfcaasusa |
| SR624 | (SEQ ID NO. 74) | AWH | (SEQ ID NO. 284) |
| SR297 | uscscuCfuAfCfAfugauuuucca | L96 | usGfsgaaAfaucauguAfgAfggasgsg |
| SR622 | (SEQ ID NO. 75) | AWH | (SEQ ID NO. 285) |
| SR244 | asgsAfucaAfGfGfcuCfacuuAfua | L96 | (vinu)sAfsuaagugagccuUfgaucususg |
| SR496 | (SEQ ID NO. 76) | AWH | (SEQ ID NO. 286) |
| SR176 | uscsAfgcaUfUfGfugAfugacCfaa | L96 | (vinu)sUfsggucaucacaaUfgcugasgsg |
| SR529 | (SEQ ID NO. 77) | AWH | (SEQ ID NO. 287) |
| SR053 | uscsAfucaUfUfCfucUfugugCfaa | L96 | (vinu)sUfsgcacaagagaaUfgaugasusc |
| SR507 | (SEQ ID NO. 78) | AWH | (SEQ ID NO. 288) |
| SR107 | usgsGfccgUfCfAfcaGfuucuCfua | L96 | (vinu)sAfsgagaacugugaCfggccascsa |
| SR584 | (SEQ ID NO. 79) | AWH | (SEQ ID NO. 289) |
| SR056 | usgsGfuccCfAfAfagCfaauuCfua | L96 | (vinu)sAfsgaauugcuuugGfgaccasgsa |
| SR571 | (SEQ ID NO. 80) | AWH | (SEQ ID NO. 290) |
| SR238 | uscsCfaguAfCfAfucUfaucaGfaa | L96 | (vinu)sUfscugauagauguAfcuggasasa |
| SR601 | (SEQ ID NO. 81) | AWH | (SEQ ID NO. 291) |
| SR323 | cscsAfguaCfAfUfcuAfucagAfaa | L96 | (vinu)sUfsucugauagaugUfacuggsasa |
| SR407 | (SEQ ID NO. 82) | AWH | (SEQ ID NO. 292) |
| SR009 | asusCfuauCfAfGfaaUfcaucAfaa | L96 | (vinu)sUfsugaugauucugAfuagausgsu |
| SR562 | (SEQ ID NO. 83) | AWH | (SEQ ID NO. 293) |
| SR316 | asasGfucaCfUfCfaaUfuccuGfaa | L96 | (vinu)sUfscaggaauugagUfgacuususa |
| SR600 | (SEQ ID NO. 84) | AWH | (SEQ ID NO. 294) |
| SR133 | cscsUfgaaCfUfAfauCfaauaUfaa | L96 | (vinu)sUfsauauugauuagUfucaggsasa |
| SR581 | (SEQ ID NO. 85) | AWH | (SEQ ID NO. 295) |
| SR058 | usgsAfacuAfAfUfcaAfuauaUfaa | L96 | (vinu)sUfsauauauugauuAfguucasgsg |
| SR438 | (SEQ ID NO. 86) | AWH | (SEQ ID ID NO. 296) |
| SR230 | usgsGfuucUfCfAfuuCfcuugCfaa | L96 | (vinu)sUfsgcaaggaaugaGfaaccasgsg |
| SR569 | (SEQ ID NO. 87) | AWH | (SEQ ID NO. 297) |
| SR322 | csusCfauuCfCfUfugCfaccaUfaa | L96 | (vinu)sUfsauggugcaaggAfaugagsasa |
| SR625 | (SEQ ID NO. 88) | AWH | (SEQ ID ID NO. 298) |
| SR125 | ususGfgcuUfUfCfugCfugggUfua | L96 | (vinu)sAfsacccagcagaaAfgccaasusa |
| SR373 | (SEQ ID NO. 89) | AWH | (SEQ ID NO. 299) |
| SR256 | uscsCfucuAfCfAfugAfuuuuCfca | L96 | (vinu)sGfsgaaaaucauguAfgaggasgsg |
| SR476 | (SEQ ID NO. 90) | AWH | (SEQ ID NO. 300) |
| SR187 | asgsauCfaAfGfGfcucacuuaua | L96 | (vinu)sAfsuaaGfuGfAfgccuUfgAfucususg |
| SR473 | (SEQ ID NO. 91) | AWH | (SEQ ID NO. 301) |
| SR150 | uscsagCfaUfUfGfugaugaccaa | L96 | (vinu)sUfsgguCfaUfCfacaaUfgCfugasgsg |
| SR639 | (SEQ ID NO. 92) | AWH | (SEQ ID NO. 302) |
| SR295 | uscsauCfaUfUfCfucuugugcaa | L96 | (vinu)sUfsgcaCfaAfGfagaaUfgAfugasusc |
| SR703 | (SEQ ID NO. 93) | AWH | (SEQ ID NO. 303) |
| SR148 | usgsgcCfgUfCfAfcaguucucua | L96 | (vinu)sAfsgagAfaCfUfgugaCfgGfccascsa |
| SR528 | (SEQ ID NO. 94) | AWH | (SEQ ID NO. 304) |
| SR131 | usgsguCfcCfAfAfagcaauucua | L96 | (vinu)sAfsgaaUfuGfCfuuugGfgAfccasgsa |
| SR702 | (SEQ ID NO. 95) | AWH | (SEQ ID NO. 305) |
| SR304 | uscscaGfuAfCfAfucuaucagaa | L96 | (vinu)sUfscugAfuAfGfauguAfcUfggasasa |
| SR559 | (SEQ ID NO. 96) | AWH | (SEQ ID NO. 306) |
| SR266 | cscsagUfaCfAfUfcuaucagaaa | L96 | (vinu)sUfsucuGfaUfAfgaugUfaCfuggsasa |
| SR521 | (SEQ ID NO. 97) | AWH | (SEQ ID NO. 307) |
| SR232 | asuscuAfuCfAfGfaaucaucaaa | L96 | (vinu)sUfsugaUfgAfUfucugAfuAfgausgsu |
| SR439 | (SEQ ID NO. 98) | AWH | (SEQ ID NO. 308) |
| SR233 | asasguCfaCfUfCfaauuccugaa | L96 | (vinu)sUfscagGfaAfUfugagUfgAfcuususa |
| SR642 | (SEQ ID NO. 99) | AWH | (SEQ ID NO. 309) |
| SR073 | cscsugAfaCfUfAfaucaauauaa | L96 | (vinu)sUfsauaUfuGfAfuuagUfuCfaggsasa |
| SR480 | (SEQ ID NO. 100) | AWH | (SEQ ID NO. 310) |
| SR038 | usgsaaCfuAfAfUfcaauauauaa | L96 | (vinu)sUfsauaUfaUfUfgauuAfgUfucasgsg |
| SR643 | (SEQ ID NO. 101) | AWH | (SEQ ID NO. 311) |
| SR257 | usgsguUfcUfCfAfuuccuugcaa | L96 | (vinu)sUfsgcaAfgGfAfaugaGfaAfccasgsg |
| SR484 | (SEQ ID NO. 102) | AWH | (SEQ ID NO. 312) |
| SR141 | csuscaUfuCfCfUfugcaccauaa | L96 | (vinu)sUfsaugGfuGfCfaaggAfaUfgagsasa |
| SR358 | (SEQ ID NO. 103) | AWH | (SEQ ID NO. 313) |
| SR138 | ususggCfuUfUfCfugcuggguua | L96 | (vinu)sAfsaccCfaGfCfagaaAfgCfcaasusa |
| SR630 | (SEQ ID NO. 104) | AWH | (SEQ ID NO. 314) |
| SR300 | uscscuCfuAfCfAfugauuuucca | L96 | (vinu)sGfsgaaAfaUfCfauguAfgAfggasgsg |
| SR513 | (SEQ ID NO. 105) | AWH | (SEQ ID NO. 315) |
| SR052 | asgsauCfaAfGfGfcucaCfuuAfua | L96 | (vinu)sAfsuaaGfuGfAfgccuUfgAfucususg |
| SR465 | (SEQ ID NO. 106) | AWH | (SEQ ID NO. 316) |
| SR163 | uscsagCfaUfUfGfugauGfacCfaa | L96 | (vinu)sUfsgguCfaUfCfacaaUfgCfugasgsg |
| SR563 | (SEQ ID NO. 107) | AWH | (SEQ ID NO. 317) |
| SR078 | uscsauCfaUfUfCfucuuGfugCfaa | L96 | (vinu)sUfsgcaCfaAfGfagaaUfgAfugasusc |
| SR690 | (SEQ ID NO. 108) | AWH | (SEQ ID NO. 318) |
| SR296 | usgsgcCfgUfCfAfcaguUfcuCfua | L96 | (vinu)sAfsgagAfaCfUfgugaCfgGfccascsa |
| SR366 | (SEQ ID NO. 109) | AWH | (SEQ ID NO. 319) |
| SR122 | usgsguCfcCfAfAfagcaAfuuCfua | L96 | (vinu)sAfsgaaUfuGfCfuuugGfgAfccasgsa |
| SR646 | (SEQ ID NO. 110) | AWH | (SEQ ID NO. 320) |
| SR248 | uscscaGfuAfCfAfucuaUfcaGfaa | L96 | (vinu)sUfscugAfuAfGfauguAfcUfggasasa |
| SR371 | (SEQ ID NO. 111) | AWH | (SEQ ID NO. 321) |
| SR292 | cscsagUfaCfAfUfcuauCfagAfaa | L96 | (vinu)sUfsucuGfaUfAfgaugUfaCfuggsasa |
| SR580 | (SEQ ID NO. 112) | AWH | (SEQ ID NO. 322) |
| SR178 | asuscuAfuCfAfGfaaucAfucAfaa | L96 | (vinu)sUfsugaUfgAfUfucugAfuAfgausgsu |
| SR633 | (SEQ ID NO. 113) | AWH | (SEQ ID NO. 323) |
| SR063 | asasguCfaCfUfCfaauuCfcuGfaa | L96 | (vinu)sUfscagGfaAfUfugagUfgAfcuususa |
| SR552 | (SEQ ID NO. 114) | AWH | (SEQ ID NO. 324) |
| SR338 | cscsugAfaCfUfAfaucaAfuaUfaa | L96 | (vinu)sUfsauaUfuGfAfuuagUfuCfaggsasa |
| SR684 | (SEQ ID NO. 115) | AWH | (SEQ ID NO. 325) |
| SR098 | usgsaaCfuAfAfUfcaauAfuaUfaa | L96 | (vinu)sUfsauaUfaUfUfgauuAfgUfucasgsg |
| SR683 | (SEQ ID NO. 116) | AWH | (SEQ ID NO. 326) |
| SR044 | usgsguUfcUfCfAfuuccUfugCfaa | L96 | (vinu)sUfsgcaAfgGfAfaugaGfaAfccasgsg |
| SR707 | (SEQ ID NO. 117) | AWH | (SEQ ID NO. 327) |
| SR200 | csuscaUfuCfCfUfugcaCfcaUfaa | L96 | (vinu)sUfsaugGfuGfCfaaggAfaUfgagsasa |
| SR679 | (SEQ ID NO. 118) | AWH | (SEQ ID NO. 328) |
| SR325 | ususggCfuUfUfCfugcuGfggUfua | L96 | (vinu)sAfsaccCfaGfCfagaaAfgCfcaasusa |
| SR567 | (SEQ ID NO. 119) | AWH | (SEQ ID NO. 329) |
| SR071 | uscscuCfuAfCfAfugauUfuuCfca | L96 | (vinu)sGfsgaaAfaUfCfauguAfgAfggasgsg |
| SR356 | (SEQ ID NO. 120) | AWH | (SEQ ID NO. 330) |
| SR264 | asgsauCfaAfGfGfcucacuuaua | L96 | (vinu)sAfsuaaGfugagccuUfgAfucususg |
| SR532 | (SEQ ID NO. 121) | AWH | (SEQ ID NO. 331) |
| SR319 | uscsagCfaUfUfGfugaugaccaa | L96 | (vinu)sUfsgguCfaucacaaUfgCfugasgsg |
| SR477 | (SEQ ID NO. 122) | AWH | (SEQ ID NO. 332) |
| SR180 | uscsauCfaUfUfCfucuugugcaa | L96 | (vinu)sUfsgcaCfaagagaaUfgAfugasusc |
| SR696 | (SEQ ID NO. 123) | AWH | (SEQ ID NO. 333) |
| SR220 | usgsgcCfgUfCfAfcaguucucua | L96 | (vinu)sAfsgagAfacugugaCfgGfccascsa |
| SR447 | (SEQ ID NO. 124) | AWH | (SEQ ID NO. 334) |
| SR320 | usgsguCfcCfAfAfagcaauucua | L96 | (vinu)sAfsgaaUfugcuuugGfgAfccasgsa |
| SR698 | (SEQ ID NO. 125) | AWH | (SEQ ID NO. 335) |
| SR160 | uscscaGfuAfCfAfucuaucagaa | L96 | (vinu)sUfscugAfuagauguAfcUfggasasa |
| SR613 | (SEQ ID NO. 126) | AWH | (SEQ ID NO. 336) |
| SR168 | cscsagUfaCfAfUfcuaucagaaa | L96 | (vinu)sUfsucuGfauagaugUfaCfuggsasa |
| SR410 | (SEQ ID NO. 127) | AWH | (SEQ ID NO. 337) |
| SR006 | asuscuAfuCfAfGfaaucaucaaa | L96 | (vinu)sUfsugaUfgauucugAfuAfgausgsu |
| SR350 | (SEQ ID NO. 128) | AWH | (SEQ ID NO. 338) |
| SR255 | asasguCfaCfUfCfaauuccugaa | L96 | (vinu)sUfscagGfaauugagUfgAfcuususa |
| SR454 | (SEQ ID NO. 129) | AWH | (SEQ ID NO. 339) |
| SR184 | cscsugAfaCfUfAfaucaauauaa | L96 | (vinu)sUfsauaUfugauuagUfuCfaggsasa |
| SR504 | (SEQ ID NO. 130) | AWH | (SEQ ID NO. 340) |
| SR083 | usgsaaCfuAfAfUfcaauauauaa | L96 | (vinu)sUfsauaUfauugauuAfgUfucasgsg |
| SR697 | (SEQ ID NO. 131) | AWH | (SEQ ID NO. 341) |
| SR031 | usgsguUfcUfCfAfuuccuugcaa | L96 | (vinu)sUfsgcaAfggaaugaGfaAfccasgsg |
| SR419 | (SEQ ID NO. 132) | AWH | (SEQ ID NO. 342) |
| SR020 | csuscaUfuCfCfUfugcaccauaa | L96 | (vinu)sUfsaugGfugcaaggAfaUfgagsasa |
| SR596 | (SEQ ID NO. 133) | AWH | (SEQ ID NO. 343) |
| SR286 | ususggCfuUfUfCfugcuggguua | L96 | (vinu)sAfsaccCfagcagaaAfgCfcaasusa |
| SR682 | (SEQ ID NO. 134) | AWH | (SEQ ID NO. 344) |
| SR283 | uscscuCfuAfCfAfugauuuucca | L96 | (vinu)sGfsgaaAfaucauguAfgAfggasgsg |
| SR687 | (SEQ ID NO. 135) | AWH | (SEQ ID NO. 345) |
| SR274 | csasagauCfaAfGfGfcucacuuaua | L96 | (vinu)sAfsuaaGfuGfAfgccuUfgAfucuugscsu |
| SR424 | (SEQ ID NO. 136) | AWH | (SEQ ID NO. 346) |
| SR208 | cscsucagCfaUfUfGfugaugaccaa | L96 | (vinu)sUfsgguCfaUfCfacaaUfgCfugaggsusu |
| SR448 | (SEQ ID NO. 137) | AWH | (SEQ ID NO. 347) |
| SR260 | gsasucauCfaUfUfCfucuugugcaa | L96 | (vinu)sUfsgcaCfaAfGfagaaUfgAfugaucsasu |
| SR565 | (SEQ ID NO. 138) | AWH | (SEQ ID NO. 348) |
| SR017 | usgsuggcCfgUfCfAfcaguucucua | L96 | (vinu)sAfsgagAfaCfUfgugaCfgGfccacascsu |
| SR414 | (SEQ ID NO. 139) | AWH | (SEQ ID NO. 349) |
| SR130 | uscsugguCfcCfAfAfagcaauucua | L96 | (vinu)sAfsgaaUfuGfCfuuugGfgAfccagasasu |
| SR487 | (SEQ ID NO. 140) | AWH | (SEQ ID NO. 350) |
| SR333 | ususuccaGfuAfCfAfucuaucagaa | L96 | (vinu)sUfscugAfuAfGfauguAfcUfggaaasusg |
| SR666 | (SEQ ID NO. 141) | AWH | (SEQ ID NO. 351) |
| SR321 | ususccagUfaCfAfUfcuaucagaaa | L96 | (vinu)sUfsucuGfaUfAfgaugUfaCfuggaasasu |
| SR603 | (SEQ ID NO. 142) | AWH | (SEQ ID NO. 352) |
| SR212 | ascsaucuAfuCfAfGfaaucaucaaa | L96 | (vinu)sUfsugaUfgAfUfucugAfuAfgaugusasc |
| SR676 | (SEQ ID NO. 143) | AWH | (SEQ ID NO. 353) |
| SR066 | usasaaguCfaCfUfCfaauuccugaa | L96 | (vinu)sUfscagGfaAfUfugagUfgAfcuuuasasg |
| SR475 | (SEQ ID NO. 144) | AWH | (SEQ ID NO. 354) |
| SR091 | ususccugAfaCfUfAfaucaauauaa | L96 | (vinu)sUfsauaUfuGfAfuuagUfuCfaggaasusu |
| SR375 | (SEQ ID NO. 145) | AWH | (SEQ ID NO. 355) |
| SR110 | cscsugaaCfuAfAfUfcaauauauaa | L96 | (vinu)sUfsauaUfaUfUfgauuAfgUfucaggsasa |
| SR518 | (SEQ ID NO. 146) | AWH | (SEQ ID NO. 356) |
| SR097 | cscsugguUfcUfCfAfuuccuugcaa | L96 | (vinu)sUfsgcaAfgGfAfaugaGfaAfccaggsasc |
| SR427 | (SEQ ID NO. 147) | AWH | (SEQ ID NO. 357) |
| SR205 | ususcucaUfuCfCfUfugcaccauaa | L96 | (vinu)sUfsaugGfuGfCfaaggAfaUfgagaascsc |
| SR445 | (SEQ ID NO. 148) | AWH | (SEQ ID NO. 358) |
| SR165 | usasuuggCfuUfUfCfugcuggguua | L96 | (vinu)sAfsaccCfaGfCfagaaAfgCfcaauasasa |
| SR678 | (SEQ ID NO. 149) | AWH | (SEQ ID NO. 359) |
| SR314 | cscsuccuCfuAfCfAfugauuuucca | L96 | (vinu)sGfsgaaAfaUfCfauguAfgAfggaggsgsg |
| SR608 | (SEQ ID NO. 150) | AWH | (SEQ ID NO. 360) |
| SR140 | csasagauCfaAfGfGfcucaCfuuAfua | L96 | (vinu)sAfsuaaGfuGfAfgccuUfgAfucuugscsu |
| SR649 | (SEQ ID NO. 151) | AWH | (SEQ ID NO. 361) |
| SR096 | cscsucagCfaUfUfGfugauGfacCfaa | L96 | (vinu)sUfsgguCfaUfCfacaaUfgCfugaggsusu |
| SR631 | (SEQ ID NO. 152) | AWH | (SEQ ID NO. 362) |
| SR106 | gsasucauCfaUfUfCfucuuGfugCfaa | L96 | (vinu)sUfsgcaCfaAfGfagaaUfgAfugaucsasu |
| SR526 | (SEQ ID NO. 153) | AWH | (SEQ ID NO. 363) |
| SR263 | usgsuggcCfgUfCfAfcaguUfcuCfu | L96 | (vinu)sAfsgagAfaCfUfgugaCfgGfccacascsu |
| SR355 | a | AWH | (SEQ ID NO. 364) |
| | (SEQ ID NO. 154) | | |
| SR222 | uscsugguCfcCfAfAfagcaAfuuCfua | L96 | (vinu)sAfsgaaUfuGfCfuuugGfgAfccagasasu |
| SR655 | (SEQ ID NO. 155) | AWH | (SEQ ID NO. 365) |
| SR294 | ususuccaGfuAfCfAfucuaUfcaGfaa | L96 | (vinu)sUfscugAfuAfGfauguAfcUfggaaasusg |
| SR450 | (SEQ ID NO. 156) | AWH | (SEQ ID NO. 366) |
| SR124 | ususccagUfaCfAfUfcuauCfagAfaa | L96 | (vinu)sUfsucuGfaUfAfgaugUfaCfuggaasasu |
| SR361 | (SEQ ID NO. 157) | AWH | (SEQ ID NO. 367) |
| SR111 | ascsaucuAfuCfAfGfaaucAfucAfaa | L96 | (vinu)sUfsugaUfgAfUfucugAfuAfgaugusasc |
| SR421 | (SEQ ID NO. 158) | AWH | (SEQ ID NO. 368) |
| SR326 | usasaaguCfaCfUfCfaauuCfcuGfaa | L96 | (vinu)sUfscagGfaAfUfugagUfgAfcuuuasasg |
| SR506 | (SEQ ID NO. 159) | AWH | (SEQ ID NO. 369) |
| SR253 | ususccugAfaCfUfAfaucaAfuaUfaa | L96 | (vinu)sUfsauaUfuGfAfuuagUfuCfaggaasusu |
| SR516 | (SEQ ID NO. 160) | AWH | (SEQ ID NO. 370) |
| SR291 | cscsugaaCfuAfAfUfcaauAfuaUfaa | L96 | (vinu)sUfsauaUfaUfUfgauuAfgUfucaggsasa |
| SR554 | (SEQ ID NO. 161) | AWH | (SEQ ID NO. 371) |
| SR011 | cscsugguUfcUfCfAfuuccUfugCfaa | L96 | (vinu)sUfsgcaAfgGfAfaugaGfaAfccaggsasc |
| SR374 | (SEQ ID NO. 162) | AWH | (SEQ ID NO. 372) |
| SR120 | ususcucaUfuCfCfUfugcaCfcaUfaa | L96 | (vinu)sUfsaugGfuGfCfaaggAfaUfgagaascsc |
| SR564 | (SEQ ID NO. 163) | AWH | (SEQ ID NO. 373) |
| SR269 | usasuuggCfuUfUfCfugcuGfggUfu | L96 | (vinu)sAfsaccCfaGfCfagaaAfgCfcaauasasa |
| SR661 | a | AWH | (SEQ ID NO. 374) |
| | (SEQ ID NO. 164) | | |
| SR042 | cscsuccuCfuAfCfAfugauUfuuCfca | L96 | (vinu)sGfsgaaAfaUfCfauguAfgAfggaggsgsg |
| SR384 | (SEQ ID NO. 165) | AWH | (SEQ ID NO. 375) |
| SR334 | csasagauCfaAfGfGfcucacuuaua | L96 | (vinu)sAfsuaaGfugagccuUfgAfucuugscsu |
| SR629 | (SEQ ID NO. 166) | AWH | (SEQ ID NO. 376) |
| SR228 | cscsucagCfaUfUfGfugaugaccaa | L96 | (vinu)sUfsgguCfaucacaaUfgCfugaggsusu |
| SR483 | (SEQ ID NO. 167) | AWH | (SEQ ID NO. 377) |
| SR345 | gsasucauCfaUfUfCfucuugugcaa | L96 | (vinu)sUfsgcaCfaagagaaUfgAfugaucsasu |
| SR527 | (SEQ ID NO. 168) | AWH | (SEQ ID NO. 378) |
| SR157 | usgsuggcCfgUfCfAfcaguucucua | L96 | (vinu)sAfsgagAfacugugaCfgGfccacascsu |
| SR556 | (SEQ ID NO. 169) | AWH | (SEQ ID NO. 379) |
| SR134 | uscsugguCfcCfAfAfagcaauucua | L96 | (vinu)sAfsgaaUfugcuuugGfgAfccagasasu |
| SR451 | (SEQ ID NO. 170) | AWH | (SEQ ID NO. 380) |
| SR041 | ususuccaGfuAfCfAfucuaucagaa | L96 | (vinu)sUfscugAfuagauguAfcUfggaaasusg |
| SR709 | (SEQ ID NO. 171) | AWH | (SEQ ID NO. 381) |
| SR278 | ususccagUfaCfAfUfcuaucagaaa | L96 | (vinu)sUfsucuGfauagaugUfaCfuggaasasu |
| SR605 | (SEQ ID NO. 172) | AWH | (SEQ ID NO. 382) |
| SR023 | ascsaucuAfuCfAfGfaaucaucaaa | L96 | (vinu)sUfsugaUfgauucugAfuAfgaugusasc |
| SR632 | (SEQ ID NO. 173) | AWH | (SEQ ID NO. 383) |
| SR245 | usasaaguCfaCfUfCfaauuccugaa | L96 | (vinu)sUfscagGfaauugagUfgAfcuuuasasg |
| SR543 | (SEQ ID NO. 174) | AWH | (SEQ ID NO. 384) |
| SR129 | ususccugAfaCfUfAfaucaauauaa | L96 | (vinu)sUfsauaUfugauuagUfuCfaggaasusu |
| SR430 | (SEQ ID NO. 175) | AWH | (SEQ ID NO. 385) |
| SR116 | cscsugaaCfuAfAfUfcaauauauaa | L96 | (vinu)sUfsauaUfauugauuAfgUfucaggsasa |
| SR462 | (SEQ ID NO. 176) | AWH | (SEQ ID NO. 386) |
| SR214 | cscsugguUfcUfCfAfuuccuugcaa | L96 | (vinu)sUfsgcaAfggaaugaGfaAfccaggsasc |
| SR588 | (SEQ ID NO. 177) | AWH | (SEQ ID NO. 387) |
| SR166 | ususcucaUfuCfCfUfugcaccauaa | L96 | (vinu)sUfsaugGfugcaaggAfaUfgagaascsc |
| SR708 | (SEQ ID NO. 178) | AWH | (SEQ ID NO. 388) |
| SR284 | usasuuggCfuUfUfCfugcuggguua | L96 | (vinu)sAfsaccCfagcagaaAfgCfcaauasasa |
| SR390 | (SEQ ID NO. 179) | AWH | (SEQ ID NO. 389) |
| SR277 | cscsuccuCfuAfCfAfugauuuucca | L96 | (vinu)sGfsgaaAfaucauguAfgAfggaggsgsg |
| SR431 | (SEQ ID NO. 180) | AWH | (SEQ ID NO. 390) |
| SR204 | asgsAfuCfaAfGfGfcucaCfuuaua | L96 | (vinu)sAfsuaaGfuGfAfgccuUfgAfucususg |
| SR540 | (SEQ ID NO. 181) | AWH | (SEQ ID NO. 391) |
| SR117 | uscsAfgCfaUfUfGfugauGfaccaa | L96 | (vinu)sUfsgguCfaUfCfacaaUfgCfugasgsg |
| SR550 | (SEQ ID NO. 182) | AWH | (SEQ ID NO. 392) |
| SR039 | uscsAfuCfaUfUfCfucuuGfugcaa | L96 | (vinu)sUfsgcaCfaAfGfagaaUfgAfugasusc |
| SR396 | (SEQ ID NO. 183) | AWH | (SEQ ID NO. 393) |
| SR152 | usgsGfcCfgUfCfAfcaguUfcucua | L96 | (vinu)sAfsgagAfaCfUfgugaCfgGfccascsa |
| SR609 | (SEQ ID NO. 184) | AWH | (SEQ ID NO. 394) |
| SR288 | usgsGfuCfcCfAfAfagcaAfuucua | L96 | (vinu)sAfsgaaUfuGfCfuuugGfgAfccasgsa |
| SR558 | (SEQ ID NO. 185) | AWH | (SEQ ID NO. 395) |
| SR221 | uscsCfaGfuAfCfAfucuaUfcagaa | L96 | (vinu)sUfscugAfuAfGfauguAfcUfggasasa |
| SR628 | (SEQ ID NO. 186) | AWH | (SEQ ID NO. 396) |
| SR243 | cscsAfgUfaCfAfUfcuauCfagaaa | L96 | (vinu)sUfsucuGfaUfAfgaugUfaCfuggsasa |
| SR620 | (SEQ ID NO. 187) | AWH | (SEQ ID NO. 397) |
| SR145 | asusCfuAfuCfAfGfaaucAfucaaa | L96 | (vinu)sUfsugaUfgAfUfucugAfuAfgausgsu |
| SR482 | (SEQ ID NO. 188) | AWH | (SEQ ID NO. 398) |
| SR217 | asasGfuCfaCfUfCfaauuCfcugaa | L96 | (vinu)sUfscagGfaAfUfugagUfgAfcuususa |
| SR365 | (SEQ ID NO. 189) | AWH | (SEQ ID NO. 399) |
| SR022 | cscsUfgAfaCfUfAfaucaAfuauaa | L96 | (vinu)sUfsauaUfuGfAfuuagUfuCfaggsasa |
| SR395 | (SEQ ID NO. 190) | AWH | (SEQ ID NO. 400) |
| SR008 | usgsAfaCfuAfAfUfcaauAfuauaa | L96 | (vinu)sUfsauaUfaUfUfgauuAfgUfucasgsg |
| SR602 | (SEQ ID NO. 191) | AWH | (SEQ ID NO. 401) |
| SR196 | usgsGfuUfcUfCfAfuuccUfugcaa | L96 | (vinu)sUfsgcaAfgGfAfaugaGfaAfccasgsg |
| SR650 | (SEQ ID NO. 192) | AWH | (SEQ ID NO. 402) |
| SR121 | csusCfaUfuCfCfUfugcaCfcauaa | L96 | (vinu)sUfsaugGfuGfCfaaggAfaUfgagsasa |
| SR520 | (SEQ ID NO. 193) | AWH | (SEQ ID NO. 403) |
| SR310 | ususGfgCfuUfUfCfugcuGfgguua | L96 | (vinu)sAfsaccCfaGfCfagaaAfgCfcaasusa |
| SR699 | (SEQ ID NO. 194) | AWH | (SEQ ID NO. 404) |
| SR139 | uscsCfuCfuAfCfAfugauUfuucca | L96 | (vinu)sGfsgaaAfaUfCfauguAfgAfggasgsg |
| SR533 | (SEQ ID NO. 195) | AWH | (SEQ ID NO. 405) |
| SR149 | asgsauCfaAfGfGfcucaCfUfuaua | L96 | (vinu)sAfsuaaGfuGfAfgccuUfgAfucususg |
| SR464 | (SEQ ID NO. 196) | AWH | (SEQ ID NO. 406) |
| SR207 | uscsagCfaUfUfGfugauGfAfccaa | L96 | (vinu)sUfsgguCfaUfCfacaaUfgCfugasgsg |
| SR433 | (SEQ ID NO. 197) | AWH | (SEQ ID NO. 407) |
| SR226 | uscsauCfaUfUfCfucuuGfUfgcaa | L96 | (vinu)sUfsgcaCfaAfGfagaaUfgAfugasusc |
| SR657 | (SEQ ID NO. 198) | AWH | (SEQ ID NO. 408) |
| SR136 | usgsgcCfgUfCfAfcaguUfCfucua | L96 | (vinu)sAfsgagAfaCfUfgugaCfgGfccascsa |
| SR354 | (SEQ ID NO. 199) | AWH | (SEQ ID NO. 409) |
| SR060 | usgsguCfcCfAfAfagcaAfUfucua | L96 | (vinu)sAfsgaaUfuGfCfuuugGfgAfccasgsa |
| SR399 | (SEQ ID NO. 200) | AWH | (SEQ ID NO. 410) |
| SR307 | uscscaGfuAfCfAfucuaUfCfagaa | L96 | (vinu)sUfscugAfuAfGfauguAfcUfggasasa |
| SR467 | (SEQ ID NO. 201) | AWH | (SEQ ID NO. 411) |
| SR311 | cscsagUfaCfAfUfcuauCfAfgaaa | L96 | (vinu)sUfsucuGfaUfAfgaugUfaCfuggsasa |
| SR440 | (SEQ ID NO. 202) | AWH | (SEQ ID NO. 412) |
| SR268 | asuscuAfuCfAfGfaaucAfUfcaaa | L96 | (vinu)sUfsugaUfgAfUfucugAfuAfgausgsu |
| SR623 | (SEQ ID NO. 203) | AWH | (SEQ ID NO. 413) |
| SR061 | asasguCfaCfUfCfaauuCfCfugaa | L96 | (vinu)sUfscagGfaAfUfugagUfgAfcuususa |
| SR692 | (SEQ ID NO. 204) | AWH | (SEQ ID NO. 414) |
| SR080 | cscsugAfaCfUfAfaucaAfUfauaa | L96 | (vinu)sUfsauaUfuGfAfuuagUfuCfaggsasa |
| SR598 | (SEQ ID NO. 205) | AWH | (SEQ ID NO. 415) |
| SR081 | usgsaaCfuAfAfUfcaauAfUfauaa | L96 | (vinu)sUfsauaUfaUfUfgauuAfgUfucasgsg |
| SR557 | (SEQ ID NO. 206) | AWH | (SEQ ID NO. 416) |
| SR065 | usgsguUfcUfCfAfuuccUfUfgcaa | L96 | (vinu)sUfsgcaAfgGfAfaugaGfaAfccasgsg |
| SR645 | (SEQ ID NO. 207) | AWH | (SEQ ID NO. 417) |
| SR309 | csuscaUfuCfCfUfugcaCfCfauaa | L96 | (vinu)sUfsaugGfuGfCfaaggAfaUfgagsasa |
| SR377 | (SEQ ID NO. 208) | AWH | (SEQ ID NO. 418) |
| SR179 | ususggCfuUfUfCfugcuGfGfguua | L96 | (vinu)sAfsaccCfaGfCfagaaAfgCfcaasusa |
| SR426 | (SEQ ID NO. 209) | AWH | (SEQ ID NO. 419) |
| SR270 | uscscuCfuAfCfAfugauUfUfucca | L96 | (vinu)sGfsgaaAfaUfCfauguAfgAfggasgsg |
| SR391 | (SEQ ID NO. 210) | AWH | (SEQ ID NO. 420) |
| SR241 | asgsauCfaAfGfGfcucaCfUfuaua | L96 | (vinu)sAfsuaaGfugagccuUfgAfucususg |
| SR515 | (SEQ ID NO. 211) | AWH | (SEQ ID NO. 421) |
| SR337 | uscsagCfaUfUfGfugauGfAfccaa | L96 | (vinu)sUfsgguCfaucacaaUfgCfugasgsg |
| SR583 | (SEQ ID NO. 212) | AWH | (SEQ ID NO. 422) |
| SR247 | uscsauCfaUfUfCfucuuGfUfgcaa | L96 | (vinu)sUfsgcaCfaagagaaUfgAfugasusc |
| SR452 | (SEQ ID NO. 213) | AWH | (SEQ ID NO. 423) |
| SR154 | usgsgcCfgUfCfAfcaguUfCfucua | L96 | (vinu)sAfsgagAfacugugaCfgGfccascsa |
| SR346 | (SEQ ID NO. 214) | AWH | (SEQ ID NO. 424) |
| SR103 | usgsguCfcCfAfAfagcaAfUfucua | L96 | (vinu)sAfsgaaUfugcuuugGfgAfccasgsa |
| SR456 | (SEQ ID NO. 215) | AWH | (SEQ ID NO. 425) |
| SR315 | uscscaGfuAfCfAfucuaUfCfagaa | L96 | (vinu)sUfscugAfuagauguAfcUfggasasa |
| SR349 | (SEQ ID NO. 216) | AWH | (SEQ ID NO. 426) |
| SR094 | cscsagUfaCfAfUfcuauCfAfgaaa | L96 | (vinu)sUfsucuGfauagaugUfaCfuggsasa |
| SR493 | (SEQ ID NO. 217) | AWH | (SEQ ID NO. 427) |
| SR336 | asuscuAfuCfAfGfaaucAfUfcaaa | L96 | (vinu)sUfsugaUfgauucugAfuAfgausgsu |
| SR459 | (SEQ ID NO. 218) | AWH | (SEQ ID NO. 428) |
| SR203 | asasguCfaCfUfCfaauuCfCfugaa | L96 | (vinu)sUfscagGfaauugagUfgAfcuususa |
| SR546 | (SEQ ID NO. 219) | AWH | (SEQ ID NO. 429) |
| SR306 | cscsugAfaCfUfAfaucaAfUfauaa | L96 | (vinu)sUfsauaUfugauuagUfuCfaggsasa |
| SR551 | (SEQ ID NO. 220) | AWH | (SEQ ID NO. 430) |
| SR092 | usgsaaCfuAfAfUfcaauAfUfauaa | L96 | (vinu)sUfsauaUfauugauuAfgUfucasgsg |
| SR385 | (SEQ ID NO. 221) | AWH | (SEQ ID NO. 431) |
| SR113 | usgsguUfcUfCfAfuuccUfUfgcaa | L96 | (vinu)sUfsgcaAfggaaugaGfaAfccasgsg |
| SR547 | (SEQ ID NO. 222) | AWH | (SEQ ID NO. 432) |
| SR335 | csuscaUfuCfCfUfugcaCfCfauaa | L96 | (vinu)sUfsaugGfugcaaggAfaUfgagsasa |
| SR443 | (SEQ ID NO. 223) | AWH | (SEQ ID NO. 433) |
| SR001 | ususggCfuUfUfCfugcuGfGfguua | L96 | (vinu)sAfsaccCfagcagaaAfgCfcaasusa |
| SR693 | (SEQ ID NO. 224) | AWH | (SEQ ID NO. 434) |
| SR265 | uscscuCfuAfCfAfugauUfUfucca | L96 | (vinu)sGfsgaaAfaucauguAfgAfggasgsg |
| SR627 | (SEQ ID NO. 225) | AWH | (SEQ ID NO. 435) |
| SR010 | csasagAfuCfaAfGfGfcucaCfuuaua | L96 | (vinu)sAfsuaaGfuGfAfgccuUfgAfucuugscsu |
| SR589 | (SEQ ID NO. 226) | AWH | (SEQ ID NO. 436) |
| SR340 | cscsucAfgCfaUfUfGfugauGfaccaa | L96 | (vinu)sUfsgguCfaUfCfacaaUfgCfugaggsusu |
| SR524 | (SEQ ID NO. 227) | AWH | (SEQ ID NO. 437) |
| SR054 | gsasucAfuCfaUfUfCfucuuGfugcaa | L96 | (vinu)sUfsgcaCfaAfGfagaaUfgAfugaucsasu |
| SR669 | (SEQ ID NO. 228) | AWH | (SEQ ID NO. 438) |
| SR262 | usgsugGfcCfgUfCfAfcaguUfcucu | L96 | (vinu)sAfsgagAfaCfUfgugaCfgGfccacascsu |
| SR491 | a | AWH | (SEQ ID NO. 439) |
| | (SEQ ID NO. 229) | | |
| SR328 | uscsugGfuCfcCfAfAfagcaAfuucua | L96 | (vinu)sAfsgaaUfuGfCfuuugGfgAfccagasasu |
| SR428 | (SEQ ID NO. 230) | AWH | (SEQ ID NO. 440) |
| SR164 | ususucCfaGfuAfCfAfucuaUfcagaa | L96 | (vinu)sUfscugAfuAfGfauguAfcUfggaaasusg |
| SR436 | (SEQ ID NO. 231) | AWH | (SEQ ID NO. 441) |
| SR144 | ususccAfgUfaCfAfUfcuauCfagaaa | L96 | (vinu)sUfsucuGfaUfAfgaugUfaCfuggaasasu |
| SR621 | (SEQ ID NO. 232) | AWH | (SEQ ID NO. 442) |
| SR015 | ascsauCfuAfuCfAfGfaaucAfucaaa | L96 | (vinu)sUfsugaUfgAfUfucugAfuAfgaugusasc |
| SR652 | (SEQ ID NO. 233) | AWH | (SEQ ID NO. 443) |
| SR210 | usasaaGfuCfaCfUfCfaauuCfcugaa | L96 | (vinu)sUfscagGfaAfUfugagUfgAfcuuuasasg |
| SR578 | (SEQ ID NO. 234) | AWH | (SEQ ID NO. 444) |
| SR004 | ususccUfgAfaCfUfAfaucaAfuauaa | L96 | (vinu)sUfsauaUfuGfAfuuagUfuCfaggaasusu |
| SR398 | (SEQ ID NO. 235) | AWH | (SEQ ID NO. 445) |
| SR173 | cscsugAfaCfuAfAfUfcaauAfuauaa | L96 | (vinu)sUfsauaUfaUfUfgauuAfgUfucaggsasa |
| SR501 | (SEQ ID NO. 236) | AWH | (SEQ ID NO. 446) |
| SR330 | cscsugGfuUfcUfCfAfuuccUfugcaa | L96 | (vinu)sUfsgcaAfgGfAfaugaGfaAfccaggsasc |
| SR383 | (SEQ ID NO. 237) | AWH | (SEQ ID NO. 447) |
| SR219 | ususcuCfaUfuCfCfUfugcaCfcauaa | L96 | (vinu)sUfsaugGfuGfCfaaggAfaUfgagaascsc |
| SR635 | (SEQ ID NO. 238) | AWH | (SEQ ID NO. 448) |
| SR007 | usasuuGfgCfuUfUfCfugcuGfgguu | L96 | (vinu)sAfsaccCfaGfCfagaaAfgCfcaauasasa |
| SR535 | a | AWH | (SEQ ID NO. 449) |
| | (SEQ ID NO. 239) | | |
| SR201 | cscsucCfuCfuAfCfAfugauUfuucca | L96 | (vinu)sGfsgaaAfaUfCfauguAfgAfggaggsgsg |
| SR392 | (SEQ ID NO. 240) | AWH | (SEQ ID NO. 450) |
| SR189 | csasagauCfaAfGfGfcucaCfUfuaua | L96 | (vinu)sAfsuaaGfuGfAfgccuUfgAfucuugscsu |
| SR582 | (SEQ ID NO. 241) | AWH | (SEQ ID NO. 451) |
| SR216 | cscsucagCfaUfUfGfugauGfAfccaa | L96 | (vinu)sUfsgguCfaUfCfacaaUfgCfugaggsusu |
| SR463 | (SEQ ID NO. 242) | AWH | (SEQ ID NO. 452) |
| SR021 | gsasucauCfaUfUfCfucuuGfUfgcaa | L96 | (vinu)sUfsgcaCfaAfGfagaaUfgAfugaucsasu |
| SR615 | (SEQ ID NO. 243) | AWH | (SEQ ID NO. 453) |
| SR027 | usgsuggcCfgUfCfAfcaguUfCfucu | L96 | (vinu)sAfsgagAfaCfUfgugaCfgGfccacascsu |
| SR544 | a | AWH | (SEQ ID NO. 454) |
| | (SEQ ID NO. 244) | | |
| SR303 | uscsugguCfcCfAfAfagcaAfUfucua | L96 | (vinu)sAfsgaaUfuGfCfuuugGfgAfccagasasu |
| SR453 | (SEQ ID NO. 245) | AWH | (SEQ ID NO. 455) |
| SR014 | ususuccaGfuAfCfAfucuaUfCfagaa | L96 | (vinu)sUfscugAfuAfGfauguAfcUfggaaasusg |
| SR429 | (SEQ ID NO. 246) | AWH | (SEQ ID NO. 456) |
| SR095 | ususccagUfaCfAfUfcuauCfAfgaaa | L96 | (vinu)sUfsucuGfaUfAfgaugUfaCfuggaasasu |
| SR519 | (SEQ ID NO. 247) | AWH | (SEQ ID NO. 457) |
| SR275 | ascsaucuAfuCfAfGfaaucAfUfcaaa | L96 | (vinu)sUfsugaUfgAfUfucugAfuAfgaugusasc |
| SR458 | (SEQ ID NO. 248) | AWH | (SEQ ID NO. 458) |
| SR012 | usasaaguCfaCfUfCfaauuCfCfugaa | L96 | (vinu)sUfscagGfaAfUfugagUfgAfcuuuasasg |
| SR481 | (SEQ ID NO. 249) | AWH | (SEQ ID NO. 459) |
| SR218 | ususccugAfaCfUfAfaucaAfUfauaa | L96 | (vinu)sUfsauaUfuGfAfuuagUfuCfaggaasusu |
| SR434 | (SEQ ID NO. 250) | AWH | (SEQ ID NO. 460) |
| SR137 | cscsugaaCfuAfAfUfcaauAfUfauaa | L96 | (vinu)sUfsauaUfaUfUfgauuAfgUfucaggsasa |
| SR662 | (SEQ ID NO. 251) | AWH | (SEQ ID NO. 461) |
| SR239 | cscsugguUfcUfCfAfuuccUfUfgcaa | L96 | (vinu)sUfsgcaAfgGfAfaugaGfaAfccaggsasc |
| SR446 | (SEQ ID NO. 252) | AWH | (SEQ ID NO. 462) |
| SR327 | ususcucaUfuCfCfUfugcaCfCfauaa | L96 | (vinu)sUfsaugGfuGfCfaaggAfaUfgagaascsc |
| SR618 | (SEQ ID NO. 253) | AWH | (SEQ ID NO. 463) |
| SR209 | usasuuggCfuUfUfCfugcuGfGfguu | L96 | (vinu)sAfsaccCfaGfCfagaaAfgCfcaauasasa |
| SR408 | a | AWH | (SEQ ID NO. 464) |
| | (SEQ ID NO. 254) | | |
| SR029 | cscsuccuCfuAfCfAfugauUfUfucca | L96 | (vinu)sGfsgaaAfaUfCfauguAfgAfggaggsgsg |
| SR685 | (SEQ ID NO. 255) | AWH | (SEQ ID NO. 465) |
| SR072 | csasagauCfaAfGfGfcucaCfUfuaua | L96 | (vinu)sAfsuaaGfugagccuUfgAfucuugscsu |
| SR449 | (SEQ ID NO. 256) | AWH | (SEQ ID NO. 466) |
| SR312 | cscsucagCfaUfUfGfugauGfAfccaa | L96 | (vinu)sUfsgguCfaucacaaUfgCfugaggsusu |
| SR362 | (SEQ ID NO. 257) | AWH | (SEQ ID NO. 467) |
| SR194 | gsasucauCfaUfUfCfucuuGfUfgcaa | L96 | (vinu)sUfsgcaCfaagagaaUfgAfugaucsasu |
| SR668 | (SEQ ID NO. 258) | AWH | (SEQ ID NO. 468) |
| SR258 | usgsuggcCfgUfCfAfcaguUfCfucu | L96 | (vinu)sAfsgagAfacugugaCfgGfccacascsu |
| SR595 | a | AWH | (SEQ ID NO. 469) |
| | (SEQ ID NO. 259) | | |
| SR142 | uscsugguCfcCfAfAfagcaAfUfucua | L96 | (vinu)sAfsgaaUfugcuuugGfgAfccagasasu |
| SR397 | (SEQ ID NO. 260) | AWH | (SEQ ID NO. 470) |
| SR032 | ususuccaGfuAfCfAfucuaUfCfagaa | L96 | (vinu)sUfscugAfuagauguAfcUfggaaasusg |
| SR404 | (SEQ ID NO. 261) | AWH | (SEQ ID NO. 471) |
| SR305 | ususccagUfaCfAfUfcuauCfAfgaaa | L96 | (vinu)sUfsucuGfauagaugUfaCfuggaasasu |
| SR653 | (SEQ ID NO. 262) | AWH | (SEQ ID NO. 472) |
| SR155 | ascsaucuAfuCfAfGfaaucAfUfcaaa | L96 | (vinu)sUfsugaUfgauucugAfuAfgaugusasc |
| SR647 | (SEQ ID NO. 263) | AWH | (SEQ ID NO. 473) |
| SR227 | usasaaguCfaCfUfCfaauuCfCfugaa | L96 | (vinu)sUfscagGfaauugagUfgAfcuuuasasg |
| SR634 | (SEQ ID NO. 264) | AWH | (SEQ ID NO. 474) |
| SR213 | ususccugAfaCfUfAfaucaAfUfauaa | L96 | (vinu)sUfsauaUfugauuagUfuCfaggaasusu |
| SR423 | (SEQ ID NO. 265) | AWH | (SEQ ID NO. 475) |
| SR273 | cscsugaaCfuAfAfUfcaauAfUfauaa | L96 | (vinu)sUfsauaUfauugauuAfgUfucaggsasa |
| SR420 | (SEQ ID NO. 266) | AWH | (SEQ ID NO. 476) |
| SR109 | cscsugguUfcUfCfAfuuccUfUfgcaa | L96 | (vinu)sUfsgcaAfggaaugaGfaAfccaggsasc |
| SR599 | (SEQ ID NO. 267) | AWH | (SEQ ID NO. 477) |
| SR112 | ususcucaUfuCfCfUfugcaCfCfauaa | L96 | (vinu)sUfsaugGfugcaaggAfaUfgagaascsc |
| SR437 | (SEQ ID NO. 268) | AWH | (SEQ ID NO. 478) |
| SR040 | usasuuggCfuUfUfCfugcuGfGfguua | L96 | (vinu)sAfsaccCfagcagaaAfgCfcaauasasa |
| SR607 | (SEQ ID NO. 269) | AWH | (SEQ ID NO. 479) |
| SR114 | cscsuccuCfuAfCfAfugauUfUfucca | L96 | (vinu)sGfsgaaAfaucauguAfgAfggaggsgsg |
| SR611 | (SEQ ID NO. 270) | AWH | (SEQ ID NO. 480) |

*siRNA modifications:
Nf = 2′-fluoro RNA;
n = 2′-OMe-RNA;
s = phosphorothioate;
(vinu) = vinyl-phosphonate 2′-OMe-uracil

[0127] In some embodiments, the siRNA molecule described herein comprises one or more conjugates; said one or more conjugate moieties can be the same conjugates or different conjugates.

[0128] In some cases, the siRNA molecule described herein comprises at least one GalNAc moiety, including any GalNAc and derivatives thereof that can be recognized by asialoglycoprotein receptors (ASGPR). In some embodiments, the interaction between the hepatocyte specific ASGPR and GalNAc leads to selectively target a GalNAc-conjugated siRNA to hepatocyte.

[0129] GalNAc is conjugated to siRNAs either directly or via a linker.

[0130] In some cases, the GalNAc moiety is conjugated to the 3′ end of the sense strand of the siRNA. In some embodiments, the GalNAc moiety is conjugated to the 3′ end nucleotide directly, for example, through a phosphodiester bond. In some embodiments, the GalNAc moiety is conjugated to the 3′ end nucleotide via a linker. In some embodiments, the GalNAc moiety is conjugated to the 5′ end nucleotide directly, for example, through a phosphodiester bond. In some embodiments, the GalNAc moiety is conjugated to the 5′ end nucleotide via a linker. In some embodiments, the conjugated siRNA comprises a formula of A-L-B (A is a siRNA; L is a linker and B is a GalNAc moiety or derivative thereof).

[0131] In some examples, the siRNA comprises a GalNAc moiety L96, which has the following structure:

[chemical structure]

[0132] In other examples, the siRNA comprises a GalNAc moiety AWH′, which has the following structure:

[chemical structure]

[0133] In other examples, the siRNA comprises a GalNAc moiety AWH, which comprises the structure of AWH′ and an aminohexyl linker, and where AWH has the following structure:

[chemical structure]

[0134] In some embodiments, the GalNAc moiety (e.g., L96 or AWH) is conjugated to the 3′ end of the sense strand of a siRNA molecule described herein. In some examples, the GalNAc moiety (e.g., L96 or AWH) is conjugated to the 3′ end of any one of the modified sense strand of SEQ ID NOs. 61-270 (Table 3). In other examples, the GalNAc moiety (e.g., L96 or AWH) is conjugated to the 3′ end of any one of the sense strand of SEQ ID NOs. 1-15 and 31-45.

[0135] In some embodiments, the siRNA molecule targeting a SLC10A1 mRNA transcript does not comprise GalNAc conjugation.

[0136] The present disclosure, by bioinformatics selection and knockdown of the expression of SLC10A1 mRNA, further identified additional siRNA molecules that can repress the expression of a human SLC10A1 mRNA transcript specifically and effectively. The siRNAs are listed in Table 4.

[0137] In some embodiments, the double-stranded siRNA molecule capable of inhibiting the expression of a human SLC10A1 mRNA transcript comprises a sense strand comprising a sequence at least about 80%, 85%, 90%, 95%, 96%, 97%, 98%, 99%, or 100% identical to a sequence selected from the group consisting of SEQ ID NOs. 481-611 and an antisense strand comprising a sequence at least about 80%, 85%, 90%, 95%, 96%, 97%, 98%, 99%, or 100% identical to the reverse complement of the sense strand of any one of SEQ ID NOs. 481-611. In some cases, the double-stranded siRNA molecule capable of inhibiting the expression of a SLC10A1 mRNA transcript comprises an antisense strand comprising a sequence at least about 80%, 85%, 90%, 95%, 96%, 97%, 98%, 99%, or 100% identical to a sequence selected from SEQ ID NOs. 612-742 and a sense strand comprising a sequence at least about 80%, 85%, 90%, 95%, 96%, 97%, 98%, 99%, or 100% identical to the reverse complement of the antisense strand of any one of SEQ ID NOs. 612-742.

[0138] In some embodiments, the siRNA molecule comprises a sense strand and an antisense strand sequences selected from the group consisting of the sequence pairs of SEQ ID NOs. 481 and 612; SEQ ID NOs. 482 and 613; SEQ ID NOs. 483 and 614; SEQ ID NOs. 484 and 615; SEQ ID NOs. 485 and 616; SEQ ID NOs. 486 and 617; SEQ ID NOs. 487 and 618; SEQ ID NOs. 488 and 619; SEQ ID NOs. 489 and 620; SEQ ID NOs. 490 and 621; SEQ ID NOs. 491 and 622; SEQ ID NOs. 492 and 623; SEQ ID NOs. 493 and 624; SEQ ID NOs. 494 and 625; SEQ ID NOs. 495 and 626; SEQ ID NOs. 496 and 627; SEQ ID NOs. 497 and 628; SEQ ID NOs. 498 and 629; SEQ ID NOs. 499 and 630; SEQ ID NOs. 500 and 631; SEQ ID NOs. 501 and 632; SEQ ID NOs. 502 and 633; SEQ ID NOs. 503 and 634; SEQ ID NOs. 504 and 635; SEQ ID NOs. 505 and 636; SEQ ID NOs. 506 and 637; SEQ ID NOs. 507 and 638; SEQ ID NOs. 508 and 639; SEQ ID NOs. 509 and 640; SEQ ID NOs. 510 and 641; SEQ ID NOs. 511 and 642; SEQ ID NOs. 512 and 643; SEQ ID NOs. 513 and 644; SEQ ID NOs. 514 and 645; SEQ ID NOs. 515 and 646; SEQ ID NOs. 516 and 647; SEQ ID NOs. 517 and 648; SEQ ID NOs. 518 and 649; SEQ ID NOs. 519 and 650; SEQ ID NOs. 520 and 651; SEQ ID NOs. 521 and 652; SEQ ID NOs. 522 and 653; SEQ ID NOs. 523 and 654; SEQ ID NOs. 524 and 655; SEQ ID NOs. 525 and 656; SEQ ID NOs. 526 and 657; SEQ ID NOs. 527 and 658; SEQ ID NOs. 528 and 659; SEQ ID NOs. 529 and 660; SEQ ID NOs. 530 and 661; SEQ ID NOs. 531 and 662; SEQ ID NOs. 532 and 663; SEQ ID NOs. 533 and 664; SEQ ID NOs. 534 and 665; SEQ ID NOs. 535 and 666; SEQ ID NOs. 536 and 667; SEQ ID NOs. 537 and 668; SEQ ID NOs. 538 and 669; SEQ ID NOs. 539 and 670; SEQ ID NOs. 540 and 671; SEQ ID NOs. 541 and 672; SEQ ID NOs. 542 and 673; SEQ ID NOs. 543 and 674; SEQ ID NOs. 544 and 675; SEQ ID NOs. 545 and 676; SEQ ID NOs. 546 and 677; SEQ ID NOs. 547 and 678; SEQ ID NOs. 548 and 679; SEQ ID NOs. 549 and 680; SEQ ID NOs. 550 and 681; SEQ ID NOs. 551 and 682; SEQ ID NOs. 552 and 683; SEQ ID NOs. 553 and 684; SEQ ID NOs. 554 and 685; SEQ ID NOs. 555 and 686; SEQ ID NOs. 556 and 687; SEQ ID NOs. 557 and 688; SEQ ID NOs. 558 and 689; SEQ ID NOs. 559 and 690; SEQ ID NOs. 560 and 691; SEQ ID NOs. 561 and 692; SEQ ID NOs. 562 and 693; SEQ ID NOs. 563 and 694; SEQ ID NOs. 564 and 695; SEQ ID NOs. 565 and 696; SEQ ID NOs. 566 and 697; SEQ ID NOs. 567 and 698; SEQ ID NOs. 568 and 699; SEQ ID NOs. 569 and 700; SEQ ID NOs. 570 and 701; SEQ ID NOs. 571 and 702; SEQ ID NOs. 572 and 703; SEQ ID NOs. 573 and 704; SEQ ID NOs. 574 and 705; SEQ ID NOs. 575 and 706; SEQ ID NOs. 576 and 707; SEQ ID NOs. 577 and 708; SEQ ID NOs. 578 and 709; SEQ ID NOs. 579 and 710; SEQ ID NOs. 580 and 711; SEQ ID NOs. 581 and 712; SEQ ID NOs. 582 and 713; SEQ ID NOs. 583 and 714; SEQ ID NOs. 584 and 715; SEQ ID NOs. 585 and 716; SEQ ID NOs. 586 and 717; SEQ ID NOs. 587 and 718; SEQ ID NOs. 588 and 719; SEQ ID NOs. 589 and 720; SEQ ID NOs. 590 and 721; SEQ ID NOs. 591 and 722; SEQ ID NOs. 592 and 723; SEQ ID NOs. 593 and 724; SEQ ID NOs. 594 and 725; SEQ ID NOs. 595 and 726; SEQ ID NOs. 596 and 727; SEQ ID NOs. 597 and 728; SEQ ID NOs. 598 and 729; SEQ ID NOs. 599 and 730; SEQ ID NOs. 600 and 731; SEQ ID NOs. 601 and 732; SEQ ID NOs. 602 and 733; SEQ ID NOs. 603 and 734; SEQ ID NOs. 604 and 735; SEQ ID NOs. 605 and 736; SEQ ID NOs. 606 and 737; SEQ ID NOs. 607 and 738; SEQ ID NOs. 608 and 739; SEQ ID NOs. 609 and 740; SEQ ID NOs. 610 and 741; and SEQ ID NOs. 611 and 742.

TABLE 4
Additional exemplary siRNA molecules targeting
SLC10A1 mRNA

| Duplex | Sense strand | Antisense strand |
|---|---|---|
| ID | sequence (5′-3′) | sequence (5′-3′) |
| SR422 | UGCGCUAUGUCAUCAAGGG | CCCUUGAUGACAUAGCGCAUG |
| | (SEQ ID NO. 481) | (SEQ ID NO. 612) |
| SR479 | UGUCCAAUGUCUUCAGUCU | AGACUGAAGACAUUGGACAGG |
| | (SEQ ID NO. 482) | (SEQ ID NO. 613) |
| SR695 | GAUCAAGGCUCACUUAUGG | CCAUAAGUGAGCCUUGAUCUU |
| | (SEQ ID NO. 483) | (SEQ ID NO. 614) |
| SR425 | AUGUCUUCAGUCUGGCCAU | AUGGCCAGACUGAAGACAUUG |
| | (SEQ ID NO. 484) | (SEQ ID NO. 615) |
| SR466 | CUUGCACCAUAGGGAUCGU | ACGAUCCCUAUGGUGCAAGGA |
| | (SEQ ID NO. 485) | (SEQ ID NO. 616) |
| SR468 | AGUCAUUGGACCACUUUUC | GAAAAGUGGUCCAAUGACUUC |
| | (SEQ ID NO. 486) | (SEQ ID NO. 617) |
| SR460 | CUGAAGUCAUUGGACCACU | AGUGGUCCAAUGACUUCAGGU |
| | (SEQ ID NO. 487) | (SEQ ID NO. 618) |
| SR495 | AGCAUUUCCAGUACAUCUA | UAGAUGUACUGGAAAUGCUGG |
| | (SEQ ID NO. 488) | (SEQ ID NO. 619) |
| SR357 | AAGGGAGGGAUGAUCAUCA | UGAUGAUCAUCCCUCCCUUGA |
| | (SEQ ID NO. 489) | (SEQ ID NO. 620) |
| SR382 | AAUUCCUGAACUAAUCAAU | AUUGAUUAGUUCAGGAAUUGA |
| | (SEQ ID NO. 490) | (SEQ ID NO. 621) |
| SR494 | GAACCUCAGCAUUGUGAUG | CAUCACAAUGCUGAGGUUCAU |
| | (SEQ ID NO. 491) | (SEQ ID NO. 622) |
| SR389 | ACUCAAUUCCUGAACUAAU | AUUAGUUCAGGAAUUGAGUGA |
| | (SEQ ID NO. 492) | (SEQ ID NO. 623) |
| SR644 | UCAUGUUUGCCAUGACACC | GGUGUCAUGGCAAACAUGAUG |
| | (SEQ ID NO. 493) | (SEQ ID NO. 624) |
| SR712 | UAGGGAUCGUCCUCAAAUC | GAUUUGAGGACGAUCCCUAUG |
| | (SEQ ID NO. 494) | (SEQ ID NO. 625) |
| SR418 | GGAGGGAUGAUCAUCAUUC | GAAUGAUGAUCAUCCCUCCCU |
| | (SEQ ID NO. 495) | (SEQ ID NO. 626) |
| SR665 | CAUGCGCUAUGUCAUCAAG | CUUGAUGACAUAGCGCAUGUA |
| | (SEQ ID NO. 496) | (SEQ ID NO. 627) |
| SR667 | CACUCAAUUCCUGAACUAA | UUAGUUCAGGAAUUGAGUGAC |
| | (SEQ ID NO. 497) | (SEQ ID NO. 628) |
| SR704 | UGGUGGCACAGUAUGGCAU | AUGCCAUACUGUGCCACCAGG |
| | (SEQ ID NO. 498) | (SEQ ID NO. 629) |
| SR511 | UGAUGCCUUUUAUUGGCUU | AAGCCAAUAAAAGGCAUCAGG |
| | (SEQ ID NO. 499) | (SEQ ID NO. 630) |
| SR706 | CCCCUCCUCUACAUGAUUU | AAAUCAUGUAGAGGAGGGGAA |
| | (SEQ ID NO. 500) | (SEQ ID NO. 631) |
| SR604 | AGUGGUCUUCCACUGCCUC | GAGGCAGUGGAAGACCACUCC |
| | (SEQ ID NO. 501) | (SEQ ID NO. 632) |
| SR536 | CAAGCGCCCCACAGACCUG | CAGGUCUGUGGGGCGCUUGCC |
| | (SEQ ID NO. 502) | (SEQ ID NO. 633) |
| SR594 | UUCUCAUUCCUUGCACCAU | AUGGUGCAAGGAAUGAGAACC |
| | (SEQ ID NO. 503) | (SEQ ID NO. 634) |
| SR675 | AUUUCCAGUACAUCUAUCA | UGAUAGAUGUACUGGAAAUGC |
| | (SEQ ID NO. 504) | (SEQ ID NO. 635) |
| SR619 | CAUGUUUGCCAUGACACCA | UGGUGUCAUGGCAAACAUGAU |
| | (SEQ ID NO. 505) | (SEQ ID NO. 636) |
| SR587 | AAAUCCCAUUCCAAGUUUU | AAAACUUGGAAUGGGAUUUGG |
| | (SEQ ID NO. 506) | (SEQ ID NO. 637) |
| SR592 | CAUGAACCUCAGCAUUGUG | CACAAUGCUGAGGUUCAUGUC |
| | (SEQ ID NO. 507) | (SEQ ID NO. 638) |
| SR348 | CCACAAUACAUGCGCUAUG | CAUAGCGCAUGUAUUGUGGCC |
| | (SEQ ID NO. 508) | (SEQ ID NO. 639) |
| SR372 | UCACUCAAUUCCUGAACUA | UAGUUCAGGAAUUGAGUGACU |
| | (SEQ ID NO. 509) | (SEQ ID NO. 640) |
| SR393 | GGUGGCACAGUAUGGCAUC | GAUGCCAUACUGUGCCACCAG |
| | (SEQ ID NO. 510) | (SEQ ID NO. 641) |
| SR674 | UGGCUUUCUGCUGGGUUAU | AUAACCCAGCAGAAAGCCAAU |
| | (SEQ ID NO. 511) | (SEQ ID NO. 642) |
| SR406 | AAAUACCCAAAUCCCAUUC | GAAUGGGAUUUGGGUAUUUGA |
| | (SEQ ID NO. 512) | (SEQ ID NO. 643) |
| SR617 | CUUCAUCAUGCUCUCGCUG | CAGCGAGAGCAUGAUGAAGAA |
| | (SEQ ID NO. 513) | (SEQ ID NO. 644) |
| SR606 | AUAUAUAUGUUUAACCCAU | AUGGGUUAAACAUAUAUAUUG |
| | (SEQ ID NO. 514) | (SEQ ID NO. 645) |
| SR489 | ACUGCCUCACAGGAGGAUG | CAUCCUCCUGUGAGGCAGUGG |
| | (SEQ ID NO. 515) | (SEQ ID NO. 646) |
| SR664 | UCAAAUCCAAACGGCCACA | UGUGGCCGUUUGGAUUUGAGG |
| | (SEQ ID NO. 516) | (SEQ ID NO. 647) |
| SR663 | UCUACAUGAUUUUCCAGCU | AGCUGGAAAAUCAUGUAGAGG |
| | (SEQ ID NO. 517) | (SEQ ID NO. 648) |
| SR500 | AGACUCCCAAGGAUAAAAC | GUUUUAUCCUUGGGAGUCUUG |
| | (SEQ ID NO. 518) | (SEQ ID NO. 649) |
| SR523 | CACCCAACUUUGGCAAGCG | CGCUUGCCAAAGUUGGGUGGC |
| | (SEQ ID NO. 519) | (SEQ ID NO. 650) |
| SR658 | UCCUCAAAUCCAAACGGCC | GGCCGUUUGGAUUUGAGGACG |
| | (SEQ ID NO. 520) | (SEQ ID NO. 651) |
| SR656 | CUUGUGCAGUGUGGCCGUC | GACGGCCACACUGCACAAGAG |
| | (SEQ ID NO. 521) | (SEQ ID NO. 652) |
| SR566 | AGAACUGCACAAGAAACGG | CCGUUUCUUGUGCAGUUCUUG |
| | (SEQ ID NO. 522) | (SEQ ID NO. 653) |
| SR517 | UGCACAAGAAACGGAGUCA | UGACUCCGUUUCUUGUGCAGU |
| | (SEQ ID NO. 523) | (SEQ ID NO. 654) |
| SR444 | ACCUGAAGUCAUUGGACCA | UGGUCCAAUGACUUCAGGUGG |
| | (SEQ ID NO. 524) | (SEQ ID NO. 655) |
| SR680 | GCCACCCAACUUUGGCAAG | CUUGCCAAAGUUGGGUGGCAG |
| | (SEQ ID NO. 525) | (SEQ ID NO. 656) |
| SR522 | GCACCAUAGGGAUCGUCCU | AGGACGAUCCCUAUGGUGCAA |
| | (SEQ ID NO. 526) | (SEQ ID NO. 657) |
| SR379 | CAGUGUGGCCGUCACAGUU | AACUGUGACGGCCACACUGCA |
| | (SEQ ID NO. 527) | (SEQ ID NO. 658) |
| SR386 | CAAACGGCCACAAUACAUG | CAUGUAUUGUGGCCGUUUGGA |
| | (SEQ ID NO. 528) | (SEQ ID NO. 659) |
| SR672 | UGCUGGGUUAUGUUCUCUC | GAGAGAACAUAACCCAGCAGA |
| | (SEQ ID NO. 529) | (SEQ ID NO. 660) |
| SR636 | CUCACUUAUGGAAGCCUAA | UUAGGCUUCCAUAAGUGAGCC |
| | (SEQ ID NO. 530) | (SEQ ID NO. 661) |
| SR561 | GGCCGUCACAGUUCUCUCU | AGAGAGAACUGUGACGGCCAC |
| | (SEQ ID NO. 531) | (SEQ ID NO. 662) |
| SR694 | UGCAGUGUGGCCGUCACAG | CUGUGACGGCCACACUGCACA |
| | (SEQ ID NO. 532) | (SEQ ID NO. 663) |
| SR553 | UCAUGCUCUCGCUGGGCUG | CAGCCCAGCGAGAGCAUGAUG |
| | (SEQ ID NO. 533) | (SEQ ID NO. 664) |
| SR478 | AUAGGGAUCGUCCUCAAAU | AUUUGAGGACGAUCCCUAUGG |
| | (SEQ ID NO. 534) | (SEQ ID NO. 665) |
| SR490 | UUCCAAGUUUUGUGACCCA | UGGGUCACAAAACUUGGAAUG |
| | (SEQ ID NO. 535) | (SEQ ID NO. 666) |
| SR485 | CAGCAUUGUGAUGACCACC | GGUGGUCAUCACAAUGCUGAG |
| | (SEQ ID NO. 536) | (SEQ ID NO. 667) |
| SR469 | GCAGUGUGGCCGUCACAGU | ACUGUGACGGCCACACUGCAC |
| | (SEQ ID NO. 537) | (SEQ ID NO. 668) |
| SR381 | CAUGAUUUUCCAGCUUGGA | UCCAAGCUGGAAAAUCAUGUA |
| | (SEQ ID NO. 538) | (SEQ ID NO. 669) |
| SR705 | GCUCACUUAUGGAAGCCUA | UAGGCUUCCAUAAGUGAGCCU |
| | (SEQ ID NO. 539) | (SEQ ID NO. 670) |
| SR673 | AUCCAAACGGCCACAAUAC | GUAUUGUGGCCGUUUGGAUUU |
| | (SEQ ID NO. 540) | (SEQ ID NO. 671) |
| SR486 | AUCAAGGGAGGGAUGAUCA | UGAUCAUCCCUCCCUUGAUGA |
| | (SEQ ID NO. 541) | (SEQ ID NO. 672) |
| SR514 | CGGCCACAAUACAUGCGCU | AGCGCAUGUAUUGUGGCCGUU |
| | (SEQ ID NO. 542) | (SEQ ID NO. 673) |
| SR542 | GGAUGGAGGCCCACAACGC | GCGUUGUGGGCCUCCAUCCUC |
| | (SEQ ID NO. 543) | (SEQ ID NO. 674) |
| SR660 | CGCCCUGGUGGCACAGUAU | AUACUGUGCCACCAGGGCGAU |
| | (SEQ ID NO. 544) | (SEQ ID NO. 675) |
| SR405 | GCAAGCGCCCCACAGACCU | AGGUCUGUGGGGCGCUUGCCA |
| | (SEQ ID NO. 545) | (SEQ ID NO. 676) |
| SR394 | UGGCCGGGAACACAGACAG | CUGUCUGUGUUCCCGGCCAAG |
| | (SEQ ID NO. 546) | (SEQ ID NO. 677) |
| SR560 | AGGGAGGGAUGAUCAUCAU | AUGAUGAUCAUCCCUCCCUUG |
| | (SEQ ID NO. 547) | (SEQ ID NO. 678) |
| SR701 | CCAACUUUGGCAAGCGCCC | GGGCGCUUGCCAAAGUUGGGU |
| | (SEQ ID NO. 548) | (SEQ ID NO. 679) |
| SR626 | ACAGUAUGGCAUCAUGCCC | GGGCAUGAUGCCAUACUGUGC |
| | (SEQ ID NO. 549) | (SEQ ID NO. 680) |
| SR359 | CUGUCCAAUGUCUUCAGUC | GACUGAAGACAUUGGACAGGU |
| | (SEQ ID NO. 550) | (SEQ ID NO. 681) |
| SR576 | CACCAUAGGGAUCGUCCUC | GAGGACGAUCCCUAUGGUGCA |
| | (SEQ ID NO. 551) | (SEQ ID NO. 682) |
| SR525 | ACCAUAGGGAUCGUCCUCA | UGAGGACGAUCCCUAUGGUGC |
| | (SEQ ID NO. 552) | (SEQ ID NO. 683) |
| SR380 | CGUCCUCAAAUCCAAACGG | CCGUUUGGAUUUGAGGACGAU |
| | (SEQ ID NO. 553) | (SEQ ID NO. 684) |
| SR492 | AGGAUGGAGGCCCACAACG | CGUUGUGGGCCUCCAUCCUCC |
| | (SEQ ID NO. 554) | (SEQ ID NO. 685) |
| SR415 | AUGCGCUAUGUCAUCAAGG | CCUUGAUGACAUAGCGCAUGU |
| | (SEQ ID NO. 555) | (SEQ ID NO. 686) |
| SR638 | AAUACCCAAAUCCCAUUCC | GGAAUGGGAUUUGGGUAUUUG |
| | (SEQ ID NO. 556) | (SEQ ID NO. 687) |
| SR351 | CAUAGGGAUCGUCCUCAAA | UUUGAGGACGAUCCCUAUGGU |
| | (SEQ ID NO. 557) | (SEQ ID NO. 688) |
| SR505 | GCGCUAUGUCAUCAAGGGA | UCCCUUGAUGACAUAGCGCAU |
| | (SEQ ID NO. 558) | (SEQ ID NO. 689) |
| SR435 | GUAUGGCAUCAUGCCCCUC | GAGGGGCAUGAUGCCAUACUG |
| | (SEQ ID NO. 559) | (SEQ ID NO. 690) |
| SR568 | AUUCCUUGCACCAUAGGGA | UCCCUAUGGUGCAAGGAAUGA |
| | (SEQ ID NO. 560) | (SEQ ID NO. 691) |
| SR539 | GGACAAGGUGCCCUAUAAA | UUUAUAGGGCACCUUGUCCUU |
| | (SEQ ID NO. 561) | (SEQ ID NO. 692) |
| SR347 | UGCACCAUAGGGAUCGUCC | GGACGAUCCCUAUGGUGCAAG |
| | (SEQ ID NO. 562) | (SEQ ID NO. 693) |
| SR686 | AGUGUGGCCGUCACAGUUC | GAACUGUGACGGCCACACUGC |
| | (SEQ ID NO. 563) | (SEQ ID NO. 694) |
| SR471 | UCACUUAUGGAAGCCUAAA | UUUAGGCUUCCAUAAGUGAGC |
| | (SEQ ID NO. 564) | (SEQ ID NO. 695) |
| SR498 | GCCCUGGUGGCACAGUAUG | CAUACUGUGCCACCAGGGCGA |
| | (SEQ ID NO. 565) | (SEQ ID NO. 696) |
| SR538 | CAGUAUGGCAUCAUGCCCC | GGGGCAUGAUGCCAUACUGUG |
| | (SEQ ID NO. 566) | (SEQ ID NO. 697) |
| SR648 | UUCUGCUGGGUUAUGUUCU | AGAACAUAACCCAGCAGAAAG |
| | (SEQ ID NO. 567) | (SEQ ID NO. 698) |
| SR488 | CUGCACAAGAAACGGAGUC | GACUCCGUUUCUUGUGCAGUU |
| | (SEQ ID NO. 568) | (SEQ ID NO. 699) |
| SR537 | ACCCUGCCACCCAACUUUG | CAAAGUUGGGUGGCAGGGUGA |
| | (SEQ ID NO. 569) | (SEQ ID NO. 700) |
| SR671 | GCCCUUGGCAUGAUGCCUC | GAGGCAUCAUGCCAAGGGCAC |
| | (SEQ ID NO. 570) | (SEQ ID NO. 701) |
| SR570 | UCCAAACGGCCACAAUACA | UGUAUUGUGGCCGUUUGGAUU |
| | (SEQ ID NO. 571) | (SEQ ID NO. 702) |
| SR502 | CUUCAGUCUGGCCAUGAAG | CUUCAUGGCCAGACUGAAGAC |
| | (SEQ ID NO. 572) | (SEQ ID NO. 703) |
| SR688 | CCUGAAGUCAUUGGACCAC | GUGGUCCAAUGACUUCAGGUG |
| | (SEQ ID NO. 573) | (SEQ ID NO. 704) |
| SR367 | GGAGUGGUCUUCCACUGCC | GGCAGUGGAAGACCACUCCUU |
| | (SEQ ID NO. 574) | (SEQ ID NO. 705) |
| SR472 | AACUUUGGCAAGCGCCCCA | UGGGGCGCUUGCCAAAGUUGG |
| | (SEQ ID NO. 575) | (SEQ ID NO. 706) |
| SR432 | CACUUAUGGAAGCCUAAAG | CUUUAGGCUUCCAUAAGUGAG |
| | (SEQ ID NO. 576) | (SEQ ID NO. 707) |
| SR409 | AGGGAUCGUCCUCAAAUCC | GGAUUUGAGGACGAUCCCUAU |
| | (SEQ ID NO. 577) | (SEQ ID NO. 708) |
| SR400 | GUCCUCAAAUCCAAACGGC | GCCGUUUGGAUUUGAGGACGA |
| | (SEQ ID NO. 578) | (SEQ ID NO. 709) |
| SR691 | AACAAAAAUGAUCUACACA | UGUGUAGAUCAUUUUUGUUUU |
| | (SEQ ID NO. 579) | (SEQ ID NO. 710) |
| SR353 | GGCUGCACCAUGGAGUUCA | UGAACUCCAUGGUGCAGCCCA |
| | (SEQ ID NO. 580) | (SEQ ID NO. 711) |
| SR585 | CCUUGCACCAUAGGGAUCG | CGAUCCCUAUGGUGCAAGGAA |
| | (SEQ ID NO. 581) | (SEQ ID NO. 712) |
| SR593 | CCUGCCACCCAACUUUGGC | GCCAAAGUUGGGUGGCAGGGU |
| | (SEQ ID NO. 582) | (SEQ ID NO. 713) |
| SR416 | CAUUCCUUGCACCAUAGGG | CCCUAUGGUGCAAGGAAUGAG |
| | (SEQ ID NO. 583) | (SEQ ID NO. 714) |
| SR654 | GGCCACAAUACAUGCGCUA | UAGCGCAUGUAUUGUGGCCGU |
| | (SEQ ID NO. 584) | (SEQ ID NO. 715) |
| SR590 | UUGCACAGCCUAGCCCUUC | GAAGGGCUAGGCUGUGCAAGG |
| | (SEQ ID NO. 585) | (SEQ ID NO. 716) |
| SR545 | CAUGCUCUCGCUGGGCUGC | GCAGCCCAGCGAGAGCAUGAU |
| | (SEQ ID NO. 586) | (SEQ ID NO. 717) |
| SR363 | ACCCAACUUUGGCAAGCGC | GCGCUUGCCAAAGUUGGGUGG |
| | (SEQ ID NO. 587) | (SEQ ID NO. 718) |
| SR369 | ACAAGGUGCCCUAUAAAGG | CCUUUAUAGGGCACCUUGUCC |
| | (SEQ ID NO. 588) | (SEQ ID NO. 719) |
| SR411 | AAGGUGCCCUAUAAAGGCA | UGCCUUUAUAGGGCACCUUGU |
| | (SEQ ID NO. 589) | (SEQ ID NO. 720) |
| SR610 | AUCGUCCUCAAAUCCAAAC | GUUUGGAUUUGAGGACGAUCC |
| | (SEQ ID NO. 590) | (SEQ ID NO. 721) |
| SR441 | GGCUCACUUAUGGAAGCCU | AGGCUUCCAUAAGUGAGCCUU |
| | (SEQ ID NO. 591) | (SEQ ID NO. 722) |
| SR711 | AAGAUCAAGGCUCACUUAU | AUAAGUGAGCCUUGAUCUUGC |
| | (SEQ ID NO. 592) | (SEQ ID NO. 723) |
| SR388 | AUCAAGGCUCACUUAUGGA | UCCAUAAGUGAGCCUUGAUCU |
| | (SEQ ID NO. 593) | (SEQ ID NO. 724) |
| SR637 | CUCAGCAUUGUGAUGACCA | UGGUCAUCACAAUGCUGAGGU |
| | (SEQ ID NO. 594) | (SEQ ID NO. 725) |
| SR574 | AGGUGCCCUAUAAAGGCAU | AUGCCUUUAUAGGGCACCUUG |
| | (SEQ ID NO. 595) | (SEQ ID NO. 726) |
| SR586 | UCAUUCCUUGCACCAUAGG | CCUAUGGUGCAAGGAAUGAGA |
| | (SEQ ID NO. 596) | (SEQ ID NO. 727) |
| SR614 | GUCAUCAAGGGAGGGAUGA | UCAUCCCUCCCUUGAUGACAU |
| | (SEQ ID NO. 597) | (SEQ ID NO. 728) |
| SR575 | CAAUACAUGCGCUAUGUCA | UGACAUAGCGCAUGUAUUGUG |
| | (SEQ ID NO. 598) | (SEQ ID NO. 729) |
| SR360 | GACAAGGUGCCCUAUAAAG | CUUUAUAGGGCACCUUGUCCU |
| | (SEQ ID NO. 599) | (SEQ ID NO. 730) |
| SR681 | AAGGAGUGGUCUUCCACUG | CAGUGGAAGACCACUCCUUGU |
| | (SEQ ID NO. 600) | (SEQ ID NO. 731) |
| SR616 | UCCCCUUGCACAGCCUAGC | GCUAGGCUGUGCAAGGGGAGC |
| | (SEQ ID NO. 601) | (SEQ ID NO. 732) |
| SR368 | ACAUGCGCUAUGUCAUCAA | UUGAUGACAUAGCGCAUGUAU |
| | (SEQ ID NO. 602) | (SEQ ID NO. 733) |
| SR659 | AAUAUAUAUGUUUAACCCA | UGGGUUAAACAUAUAUAUUGA |
| | (SEQ ID NO. 603) | (SEQ ID NO. 734) |
| SR531 | UUCAUCAUGCUCUCGCUGG | CCAGCGAGAGCAUGAUGAAGA |
| | (SEQ ID NO. 604) | (SEQ ID NO. 735) |
| SR591 | AUCAUGCUCUCGCUGGGCU | AGCCCAGCGAGAGCAUGAUGA |
| | (SEQ ID NO. 605) | (SEQ ID NO. 736) |
| SR549 | AAGGACAAGGUGCCCUAUA | UAUAGGGCACCUUGUCCUUCA |
| | (SEQ ID NO. 606) | (SEQ ID NO. 737) |
| SR503 | CUCCCCUUGCACAGCCUAG | CUAGGCUGUGCAAGGGGAGCA |
| | (SEQ ID NO. 607) | (SEQ ID NO. 738) |
| SR352 | UUGCACCAUAGGGAUCGUC | GACGAUCCCUAUGGUGCAAGG |
| | (SEQ ID NO. 608) | (SEQ ID NO. 739) |
| SR510 | CAAGGUGCCCUAUAAAGGC | GCCUUUAUAGGGCACCUUGUC |
| | (SEQ ID NO. 609) | (SEQ ID NO. 740) |
| SR548 | GUUCUCAUUCCUUGCACCA | UGGUGCAAGGAAUGAGAACCA |
| | (SEQ ID NO. 610) | (SEQ ID NO. 741) |
| SR577 | CAUCAUGCUCUCGCUGGGC | GCCCAGCGAGAGCAUGAUGAA |
| | (SEQ ID NO. 611) | (SEQ ID NO. 742) |

[0139] As discussed above, the siRNA molecule may comprise one or more modifications. In some embodiments, the sense strand of the siRNA in Table 4 may comprise one or more modifications. In some embodiments, the antisense strand of the siRNA in Table 4 may comprise one or more modifications. In some embodiments, the sense and antisense strands of the siRNA duplex in Table 4 may comprise one or more modifications. In some embodiments, the last nucleotide of the sense strand of a siRNA molecule is modified as adenine. In some embodiments, the first nucleotide of the antisense strand of a siRNA molecule is modified as uracil.

[0140] The siRNA molecule targeting a SLC10A1 mRNA transcript comprises a pair of a modified sense strand and a modified antisense strand in Table 5. As non-limiting examples, the siRNA molecule comprises a modified sense strand and a modified antisense strand selected from the group consisting of the sequence pairs of SEQ ID NOs. 743 and 874; SEQ ID NOs. 744 and 875; SEQ ID NOs. 745 and 876; SEQ ID NOs. 746 and 877; SEQ ID NOs. 747 and 878; SEQ ID NOs. 748 and 879; SEQ ID NOs. 749 and 880; SEQ ID NOs. 750 and 881; SEQ ID NOs. 751 and 882; SEQ ID NOs. 752 and 883; SEQ ID NOs. 753 and 884; SEQ ID NOs. 754 and 885; SEQ ID NOs. 755 and 886; SEQ ID NOs. 756 and 887; SEQ ID NOs. 757 and 888; SEQ ID NOs. 758 and 889; SEQ ID NOs. 759 and 890; SEQ ID NOs. 760 and 891; SEQ ID NOs. 761 and 892; SEQ ID NOs. 762 and 893; SEQ ID NOs. 763 and 894; SEQ ID NOs. 764 and 895; SEQ ID NOs. 765 and 896; SEQ ID NOs. 766 and 897; SEQ ID NOs. 767 and 898; SEQ ID NOs. 768 and 899; SEQ ID NOs. 769 and 900; SEQ ID NOs. 770 and 901; SEQ ID NOs. 771 and 902; SEQ ID NOs. 772 and 903; SEQ ID NOs. 773 and 904; SEQ ID NOs. 774 and 905; SEQ ID NOs. 775 and 906; SEQ ID NOs. 776 and 907; SEQ ID NOs. 777 and 908; SEQ ID NOs. 778 and 909; SEQ ID NOs. 779 and 910; SEQ ID NOs. 780 and 911; SEQ ID NOs. 781 and 912; SEQ ID NOs. 782 and 913; SEQ ID NOs. 783 and 914; SEQ ID NOs. 784 and 915; SEQ ID NOs. 785 and 916; SEQ ID NOs. 786 and 917; SEQ ID NOs. 787 and 918; SEQ ID NOs. 788 and 919; SEQ ID NOs. 789 and 920; SEQ ID NOs. 790 and 921; SEQ ID NOs. 791 and 922; SEQ ID NOs. 792 and 923; SEQ ID NOs. 793 and 924; SEQ ID NOs. 794 and 925; SEQ ID NOs. 795 and 926; SEQ ID NOs. 796 and 927; SEQ ID NOs. 797 and 928; SEQ ID NOs. 798 and 929; SEQ ID NOs. 799 and 930; SEQ ID NOs. 800 and 931; SEQ ID NOs. 801 and 932; SEQ ID NOs. 802 and 933; SEQ ID NOs. 803 and 934; SEQ ID NOs. 804 and 935; SEQ ID NOs. 805 and 936; SEQ ID NOs. 806 and 937; SEQ ID NOs. 807 and 938; SEQ ID NOs. 808 and 939; SEQ ID NOs. 809 and 940; SEQ ID NOs. 810 and 941; SEQ ID NOs. 811 and 942; SEQ ID NOs. 812 and 943; SEQ ID NOs. 813 and 944; SEQ ID NOs. 814 and 945; SEQ ID NOs. 815 and 946; SEQ ID NOs. 816 and 947; SEQ ID NOs. 817 and 948; SEQ ID NOs. 818 and 949; SEQ ID NOs. 819 and 950; SEQ ID NOs. 820 and 951; SEQ ID NOs. 821 and 952; SEQ ID NOs. 822 and 953; SEQ ID NOs. 823 and 954; SEQ ID NOs. 824 and 955; SEQ ID NOs. 825 and 956; SEQ ID NOs. 826 and 957; SEQ ID NOs. 827 and 958; SEQ ID NOs. 828 and 959; SEQ ID NOs. 829 and 960; SEQ ID NOs. 830 and 961; SEQ ID NOs. 831 and 962; SEQ ID NOs. 832 and 963; SEQ ID NOs. 833 and 964; SEQ ID NOs. 834 and 965; SEQ ID NOs. 835 and 966; SEQ ID NOs. 836 and 967; SEQ ID NOs. 837 and 968; SEQ ID NOs. 838 and 969; SEQ ID NOs. 839 and 970; SEQ ID NOs. 840 and 971; SEQ ID NOs. 841 and 972; SEQ ID NOs. 842 and 973; SEQ ID NOs. 843 and 974; SEQ ID NOs. 844 and 975; SEQ ID NOs. 845 and 976; SEQ ID NOs. 846 and 977; SEQ ID NOs. 847 and 978; SEQ ID NOs. 848 and 979; SEQ ID NOs. 849 and 980; SEQ ID NOs. 850 and 981; SEQ ID NOs. 851 and 982; SEQ ID NOs. 852 and 983; SEQ ID NOs. 853 and 984; SEQ ID NOs. 854 and 985; SEQ ID NOs. 855 and 986; SEQ ID NOs. 856 and 987; SEQ ID NOs. 857 and 988; SEQ ID NOs. 858 and 989; SEQ ID NOs. 859 and 990; SEQ ID NOs. 860 and 991; SEQ ID NOs. 861 and 992; SEQ ID NOs. 862 and 993; SEQ ID NOs. 863 and 994; SEQ ID NOs. 864 and 995; SEQ ID NOs. 865 and 996; SEQ ID NOs.866 and 997; SEQ ID NOs. 867 and 998; SEQ ID NOs. 868 and 999; SEQ ID NOs. 869 and 1000; SEQ ID NOs. 870 and 1001; SEQ ID NOs. 871 and 1002; SEQ ID NOs. 872 and 1003; and SEQ ID NOs. 873 and 1004.

[0141] In some embodiments, the siRNA molecule further comprises GalNAc at the 3′ end of the sense strand. The GalNAc is L96 (Table 5). In some cases, the GalNAc is AWH. In some embodiments, the siRNA molecule does not comprise GalNAc. In some examples, the GalNAc moiety (e.g., L96 or AWH) is conjugated to the 3′ end of any one of the sense strand of SEQ ID NOs. 481-611. In other examples, the GalNAc moiety (e.g., L96 or AWH) is conjugated to the 3′ end of any one of the modified sense strand of SEQ ID NOs. 743-873.

TABLE 5
Modified sense and antisense strands of siRNAs

| | | GalNAc at | |
|---|---|---|---|
| Duplex | Sense (S) strand sequence | the 3′end of | Antisense strand (AS) sequence |
| ID | (5′-3′) | the S strand | (5′-3′) |
| SR002 | gsusccUfcAfAfAfuccaaacgga | L96 | usCfscguUfuggauuuGfaGfgacsgsa |
| SR827 | (SEQ ID NO. 743) | AWH | (SEQ ID NO. 874) |
| SR003 | gscsacCfaUfAfGfggaucgucca | L96 | usGfsgacGfaucccuaUfgGfugcsasa |
| SR769 | (SEQ ID NO. 744) | AWH | (SEQ ID NO. 875) |
| SR005 | asusucCfuUfGfCfaccauaggga | L96 | usCfsccuAfuggugcaAfgGfaausgsa |
| SR765 | (SEQ ID NO. 745) | AWH | (SEQ ID NO. 876) |
| SR013 | gsgsugGfcAfCfAfguauggcaua | L96 | usAfsugcCfauacuguGfcCfaccsasg |
| SR723 | (SEQ ID NO. 746) | AWH | (SEQ ID NO. 877) |
| SR016 | csusgcAfcAfAfGfaaacggagua | L96 | usAfscucCfguuucuuGfuGfcagsusu |
| SR772 | (SEQ ID NO. 747) | AWH | (SEQ ID NO. 878) |
| SR018 | ususccAfaGfUfUfuugugaccca | L96 | usGfsgguCfacaaaacUfuGfgaasusg |
| SR747 | (SEQ ID NO. 748) | AWH | (SEQ ID NO. 879) |
| SR024 | csasugAfaCfCfUfcagcauugua | L96 | usAfscaaUfgcugaggUfuCfaugsusc |
| SR787 | (SEQ ID NO. 749) | AWH | (SEQ ID NO. 880) |
| SR025 | asasgaUfcAfAfGfgcucacuuaa | L96 | usUfsaagUfgagccuuGfaUfcuusgsc |
| SR837 | (SEQ ID NO. 750) | AWH | (SEQ ID NO. 881) |
| SR026 | ususcuGfcUfGfGfguuauguuca | L96 | usGfsaacAfuaacccaGfcAfgaasasg |
| SR761 | (SEQ ID NO. 751) | AWH | (SEQ ID NO. 882) |
| SR030 | gsasacCfuCfAfGfcauugugaua | L96 | usAfsucaCfaaugcugAfgGfuucsasu |
| SR718 | (SEQ ID NO. 752) | AWH | (SEQ ID NO. 883) |
| SR033 | csascuUfaUfGfGfaagccuaaaa | L96 | usUfsuuaGfgcuuccaUfaAfgugsasg |
| SR763 | (SEQ ID NO. 753) | AWH | (SEQ ID NO. 884) |
| SR034 | csasauAfcAfUfGfcgcuauguca | L96 | usGfsacaUfagcgcauGfuAfuugsusg |
| SR812 | (SEQ ID NO. 754) | AWH | (SEQ ID NO. 885) |
| SR035 | csusucAfuCfAfUfgcucucgcua | L96 | usAfsgcgAfgagcaugAfuGfaagsasa |
| SR771 | (SEQ ID NO. 755) | AWH | (SEQ ID NO. 886) |
| SR036 | asuscaUfgCfUfCfucgcugggca | L96 | usGfscccAfgcgagagCfaUfgausgsa |
| SR742 | (SEQ ID NO. 756) | AWH | (SEQ ID NO. 887) |
| SR037 | asasauCfcCfAfUfuccaaguuua | L96 | usAfsaacUfuggaaugGfgAfuuusgsg |
| SR779 | (SEQ ID NO. 757) | AWH | (SEQ ID NO. 888) |
| SR043 | uscsuaCfaUfGfAfuuuuccagca | L96 | usGfscugGfaaaaucaUfgUfagasgsg |
| SR743 | (SEQ ID NO. 758) | AWH | (SEQ ID NO. 889) |
| SR045 | usgscuGfgGfUfUfauguucucua | L96 | usAfsgagAfacauaacCfcAfgcasgsa |
| SR795 | (SEQ ID NO. 759) | AWH | (SEQ ID NO. 890) |
| SR046 | asgsggAfuCfGfUfccucaaauca | L96 | usGfsauuUfgaggacgAfuCfccusasu |
| SR735 | (SEQ ID NO. 760) | AWH | (SEQ ID NO. 891) |
| SR048 | csasguAfuGfGfCfaucaugccca | L96 | usGfsggcAfugaugccAfuAfcugsusg |
| SR797 | (SEQ ID NO. 761) | AWH | (SEQ ID NO. 892) |
| SR049 | ususcaUfcAfUfGfcucucgcuga | L96 | usCfsagcGfagagcauGfaUfgaasgsa |
| SR817 | (SEQ ID NO. 762) | AWH | (SEQ ID NO. 893) |
| SR050 | ususcuCfaUfUfCfcuugcaccaa | L96 | usUfsgguGfcaaggaaUfgAfgaascsc |
| SR834 | (SEQ ID NO. 763) | AWH | (SEQ ID NO. 894) |
| SR051 | gsgscuGfcAfCfCfauggaguuca | L96 | usGfsaacUfccaugguGfcAfgccscsa |
| SR750 | (SEQ ID NO. 764) | AWH | (SEQ ID NO. 895) |
| SR057 | asascuUfuGfGfCfaagcgcccca | L96 | usGfsgggCfgcuugccAfaAfguusgsg |
| SR815 | (SEQ ID NO. 765) | AWH | (SEQ ID NO. 896) |
| SR059 | asgsucAfuUfGfGfaccacuuuua | L96 | usAfsaaaGfugguccaAfuGfacususc |
| SR782 | (SEQ ID NO. 766) | AWH | (SEQ ID NO. 897) |
| SR062 | usgsguGfgCfAfCfaguauggcaa | L96 | usUfsgccAfuacugugCfcAfccasgsg |
| SR828 | (SEQ ID NO. 767) | AWH | (SEQ ID NO. 898) |
| SR064 | asgsggAfgGfGfAfugaucaucaa | L96 | usUfsgauGfaucauccCfuCfccususg |
| SR783 | (SEQ ID NO. 768) | AWH | (SEQ ID NO. 899) |
| SR067 | cscsugAfaGfUfCfauuggaccaa | L96 | usUfsgguCfcaaugacUfuCfaggsusg |
| SR767 | (SEQ ID NO. 769) | AWH | (SEQ ID NO. 900) |
| SR068 | ascsucAfaUfUfCfcugaacuaaa | L96 | usUfsuagUfucaggaaUfuGfagusgsa |
| SR819 | (SEQ ID NO. 770) | AWH | (SEQ ID NO. 901) |
| SR070 | gscsccUfuGfGfCfaugaugccua | L96 | usAfsggcAfucaugccAfaGfggcsasc |
| SR800 | (SEQ ID NO. 771) | AWH | (SEQ ID NO. 902) |
| SR074 | csasugCfuCfUfCfgcugggcuga | L96 | usCfsagcCfcagcgagAfgCfaugsasu |
| SR824 | (SEQ ID NO. 772) | AWH | (SEQ ID NO. 903) |
| SR075 | asusagGfgAfUfCfguccucaaaa | L96 | usUfsuugAfggacgauCfcCfuausgsg |
| SR721 | (SEQ ID NO. 773) | AWH | (SEQ ID NO. 904) |
| SR076 | uscsauGfuUfUfGfccaugacaca | L96 | usGfsuguCfauggcaaAfcAfugasusg |
| SR714 | (SEQ ID NO. 774) | AWH | (SEQ ID NO. 905) |
| SR077 | ascsagUfaUfGfGfcaucaugcca | L96 | usGfsgcaUfgaugccaUfaCfugusgsc |
| SR732 | (SEQ ID NO. 775) | AWH | (SEQ ID NO. 906) |
| SR079 | uscsacUfcAfAfUfuccugaacua | L96 | usAfsguuCfaggaauuGfaGfugascsu |
| SR768 | (SEQ ID NO. 776) | AWH | (SEQ ID NO. 907) |
| SR084 | uscscuCfaAfAfUfccaaacggca | L96 | usGfsccgUfuuggauuUfgAfggascsg |
| SR729 | (SEQ ID NO. 777) | AWH | (SEQ ID NO. 908) |
| SR085 | gsgsccAfcAfAfUfacaugcgcua | L96 | usAfsgcgCfauguauuGfuGfgccsgsu |
| SR745 | (SEQ ID NO. 778) | AWH | (SEQ ID NO. 909) |
| SR086 | gscsagUfgUfGfGfccgucacaga | L96 | usCfsuguGfacggccaCfaCfugcsasc |
| SR789 | (SEQ ID NO. 779) | AWH | (SEQ ID NO. 910) |
| SR087 | cscsuuGfcAfCfCfauagggauca | L96 | usGfsaucCfcuaugguGfcAfaggsasa |
| SR724 | (SEQ ID NO. 780) | AWH | (SEQ ID NO. 911) |
| SR088 | ascsaaGfgUfGfCfccuauaaaga | L96 | usCfsuuuAfuagggcaCfcUfuguscsc |
| SR806 | (SEQ ID NO. 781) | AWH | (SEQ ID NO. 912) |
| SR089 | csasuuCfcUfUfGfcaccauagga | L96 | usCfscuaUfggugcaaGfgAfaugsasg |
| SR805 | (SEQ ID NO. 782) | AWH | (SEQ ID NO. 913) |
| SR090 | gsasucAfaGfGfCfucacuuauga | L96 | usCfsauaAfgugagccUfuGfaucsusu |
| SR755 | (SEQ ID NO. 783) | AWH | (SEQ ID NO. 914) |
| SR093 | ascsugCfcUfCfAfcaggaggaua | L96 | usAfsuccUfccugugaGfgCfagusgsg |
| SR760 | (SEQ ID NO. 784) | AWH | (SEQ ID NO. 915) |
| SR099 | ascsccAfaCfUfUfuggcaagcga | L96 | usCfsgcuUfgccaaagUfuGfggusgsg |
| SR727 | (SEQ ID NO. 785) | AWH | (SEQ ID NO. 916) |
| SR100 | gsgscuCfaCfUfUfauggaagcca | L96 | usGfsgcuUfccauaagUfgAfgccsusu |
| SR736 | (SEQ ID NO. 786) | AWH | (SEQ ID NO. 917) |
| SR101 | gsgsccGfuCfAfCfaguucucuca | L96 | usGfsagaGfaacugugAfcGfgccsasc |
| SR814 | (SEQ ID NO. 787) | AWH | (SEQ ID NO. 918) |
| SR102 | asasauAfcCfCfAfaaucccauua | L96 | usAfsaugGfgauuuggGfuAfuuusgsa |
| SR731 | (SEQ ID NO. 788) | AWH | (SEQ ID NO. 919) |
| SR104 | csusgaAfgUfCfAfuuggaccaca | L96 | usGfsuggUfccaaugaCfuUfcagsgsu |
| SR838 | (SEQ ID NO. 789) | AWH | (SEQ ID NO. 920) |
| SR105 | csgsucCfuCfAfAfauccaaacga | L96 | usCfsguuUfggauuugAfgGfacgsasu |
| SR738 | (SEQ ID NO. 790) | AWH | (SEQ ID NO. 921) |
| SR108 | cscsaaCfuUfUfGfgcaagcgcca | L96 | usGfsgcgCfuugccaaAfgUfuggsgsu |
| SR766 | (SEQ ID NO. 791) | AWH | (SEQ ID NO. 922) |
| SR115 | csasugCfgCfUfAfugucaucaaa | L96 | usUfsugaUfgacauagCfgCfaugsusa |
| SR840 | (SEQ ID NO. 792) | AWH | (SEQ ID NO. 923) |
| SR118 | gscsaaGfcGfCfCfccacagacca | L96 | usGfsgucUfguggggcGfcUfugcscsa |
| SR822 | (SEQ ID NO. 793) | AWH | (SEQ ID NO. 924) |
| SR119 | csusguCfcAfAfUfgucuucagua | L96 | usAfscugAfagacauuGfgAfcagsgsu |
| SR801 | (SEQ ID NO. 794) | AWH | (SEQ ID NO. 925) |
| SR123 | usgscaCfaAfGfAfaacggaguca | L96 | usGfsacuCfcguuucuUfgUfgcasgsu |
| SR808 | (SEQ ID NO. 795) | AWH | (SEQ ID NO. 926) |
| SR126 | csasgcAfuUfGfUfgaugaccaca | L96 | usGfsuggUfcaucacaAfuGfcugsasg |
| SR734 | (SEQ ID NO. 796) | AWH | (SEQ ID NO. 927) |
| SR127 | uscsauGfcUfCfUfcgcugggcua | L96 | usAfsgccCfagcgagaGfcAfugasusg |
| SR839 | (SEQ ID NO. 797) | AWH | (SEQ ID NO. 928) |
| SR128 | csgsccCfuGfGfUfggcacaguaa | L96 | usUfsacuGfugccaccAfgGfgcgsasu |
| SR796 | (SEQ ID NO. 798) | AWH | (SEQ ID NO. 929) |
| SR132 | uscscaAfaCfGfGfccacaauaca | L96 | usGfsuauUfguggccgUfuUfggasusu |
| SR764 | (SEQ ID NO. 799) | AWH | (SEQ ID NO. 930) |
| SR135 | csgsgcCfaCfAfAfuacaugcgca | L96 | usGfscgcAfuguauugUfgGfccgsusu |
| SR816 | (SEQ ID NO. 800) | AWH | (SEQ ID NO. 931) |
| SR143 | asusgcGfcUfAfUfgucaucaaga | L96 | usCfsuugAfugacauaGfcGfcausgsu |
| SR825 | (SEQ ID NO. 801) | AWH | (SEQ ID NO. 932) |
| SR146 | usgscgCfuAfUfGfucaucaagga | L96 | usCfscuuGfaugacauAfgCfgcasusg |
| SR810 | (SEQ ID NO. 802) | AWH | (SEQ ID NO. 933) |
| SR147 | asgsugGfuCfUfUfccacugccua | L96 | usAfsggcAfguggaagAfcCfacuscsc |
| SR713 | (SEQ ID NO. 803) | AWH | (SEQ ID NO. 934) |
| SR151 | asgsguGfcCfCfUfauaaaggcaa | L96 | usUfsgccUfuuauaggGfcAfccususg |
| SR804 | (SEQ ID NO. 804) | AWH | (SEQ ID NO. 935) |
| SR153 | uscsccCfuUfGfCfacagccuaga | L96 | usCfsuagGfcugugcaAfgGfggasgsc |
| SR786 | (SEQ ID NO. 805) | AWH | (SEQ ID NO. 936) |
| SR156 | gscsgcUfaUfGfUfcaucaaggga | L96 | usCfsccuUfgaugacaUfaGfcgcsasu |
| SR726 | (SEQ ID NO. 806) | AWH | (SEQ ID NO. 937) |
| SR161 | csasagGfuGfCfCfcuauaaagga | L96 | usCfscuuUfauagggcAfcCfuugsusc |
| SR728 | (SEQ ID NO. 807) | AWH | (SEQ ID NO. 938) |
| SR162 | asusauAfuAfUfGfuuuaacccaa | L96 | usUfsgggUfuaaacauAfuAfuaususg |
| SR843 | (SEQ ID NO. 808) | AWH | (SEQ ID NO. 939) |
| SR169 | gsgsacAfaGfGfUfgcccuauaaa | L96 | usUfsuauAfgggcaccUfuGfuccsusu |
| SR792 | (SEQ ID NO. 809) | AWH | (SEQ ID NO. 940) |
| SR170 | gsuscaUfcAfAfGfggagggauga | L96 | usCfsaucCfcucccuuGfaUfgacsasu |
| SR832 | (SEQ ID NO. 810) | AWH | (SEQ ID NO. 941) |
| SR171 | csasucAfuGfCfUfcucgcuggga | L96 | usCfsccaGfcgagagcAfuGfaugsasa |
| SR833 | (SEQ ID NO. 811) | AWH | (SEQ ID NO. 942) |
| SR172 | gsgsagUfgGfUfCfuuccacugca | L96 | usGfscagUfggaagacCfaCfuccsusu |
| SR775 | (SEQ ID NO. 812) | AWH | (SEQ ID NO. 943) |
| SR174 | asusguCfuUfCfAfgucuggccaa | L96 | usUfsggcCfagacugaAfgAfcaususg |
| SR790 | (SEQ ID NO. 813) | AWH | (SEQ ID NO. 944) |
| SR175 | ascscaUfaGfGfGfaucguccuca | L96 | usGfsaggAfcgaucccUfaUfggusgsc |
| SR777 | (SEQ ID NO. 814) | AWH | (SEQ ID NO. 945) |
| SR177 | usgsgcUfuUfCfUfgcuggguuaa | L96 | usUfsaacCfcagcagaAfaGfccasasu |
| SR780 | (SEQ ID NO. 815) | AWH | (SEQ ID NO. 946) |
| SR181 | csusugUfgCfAfGfuguggccgua | L96 | usAfscggCfcacacugCfaCfaagsasg |
| SR717 | (SEQ ID NO. 816) | AWH | (SEQ ID NO. 947) |
| SR182 | asgsugUfgGfCfCfgucacaguua | L96 | usAfsacuGfugacggcCfaCfacusgsc |
| SR802 | (SEQ ID NO. 817) | AWH | (SEQ ID NO. 948) |
| SR183 | usgscaCfcAfUfAfgggaucguca | L96 | usGfsacgAfucccuauGfgUfgcasasg |
| SR813 | (SEQ ID NO. 818) | AWH | (SEQ ID NO. 949) |
| SR185 | gscsucAfcUfUfAfuggaagccua | L96 | usAfsggcUfuccauaaGfuGfagcscsu |
| SR744 | (SEQ ID NO. 819) | AWH | (SEQ ID NO. 950) |
| SR186 | csasccAfuAfGfGfgaucguccua | L96 | usAfsggaCfgaucccuAfuGfgugscsa |
| SR757 | (SEQ ID NO. 820) | AWH | (SEQ ID NO. 951) |
| SR188 | cscsccUfcCfUfCfuacaugauua | L96 | usAfsaucAfuguagagGfaGfgggsasa |
| SR733 | (SEQ ID NO. 821) | AWH | (SEQ ID NO. 952) |
| SR190 | csusccCfcUfUfGfcacagccuaa | L96 | usUfsaggCfugugcaaGfgGfgagscsa |
| SR829 | (SEQ ID NO. 822) | AWH | (SEQ ID NO. 953) |
| SR191 | csasaaCfgGfCfCfacaauacaua | L96 | usAfsuguAfuuguggcCfgUfuugsgsa |
| SR826 | (SEQ ID NO. 823) | AWH | (SEQ ID NO. 954) |
| SR192 | usgsauGfcCfUfUfuuauuggcua | L96 | usAfsgccAfauaaaagGfcAfucasgsg |
| SR759 | (SEQ ID NO. 824) | AWH | (SEQ ID NO. 955) |
| SR193 | ususgcAfcCfAfUfagggaucgua | L96 | usAfscgaUfcccuaugGfuGfcaasgsg |
| SR739 | (SEQ ID NO. 825) | AWH | (SEQ ID NO. 956) |
| SR198 | asasggAfgUfGfGfucuuccacua | L96 | usAfsgugGfaagaccaCfuCfcuusgsu |
| SR749 | (SEQ ID NO. 826) | AWH | (SEQ ID NO. 957) |
| SR199 | csasugUfuUfGfCfcaugacacca | L96 | usGfsgugUfcauggcaAfaCfaugsasu |
| SR752 | (SEQ ID NO. 827) | AWH | (SEQ ID NO. 958) |
| SR202 | ascsauGfcGfCfUfaugucaucaa | L96 | usUfsgauGfacauagcGfcAfugusasu |
| SR778 | (SEQ ID NO. 828) | AWH | (SEQ ID NO. 959) |
| SR206 | gsgsauGfgAfGfGfcccacaacga | L96 | usCfsguuGfugggccuCfcAfuccsusc |
| SR730 | (SEQ ID NO. 829) | AWH | (SEQ ID NO. 960) |
| SR211 | gscsccUfgGfUfGfgcacaguaua | L96 | usAfsuacUfgugccacCfaGfggcsgsa |
| SR835 | (SEQ ID NO. 830) | AWH | (SEQ ID NO. 961) |
| SR215 | asasggGfaGfGfGfaugaucauca | L96 | usGfsaugAfucaucccUfcCfcuusgsa |
| SR722 | (SEQ ID NO. 831) | AWH | (SEQ ID NO. 962) |
| SR223 | asusuuCfcAfGfUfacaucuauca | L96 | usGfsauaGfauguacuGfgAfaausgsc |
| SR748 | (SEQ ID NO. 832) | AWH | (SEQ ID NO. 963) |
| SR224 | asasuaCfcCfAfAfaucccauuca | L96 | usGfsaauGfggauuugGfgUfauususg |
| SR842 | (SEQ ID NO. 833) | AWH | (SEQ ID NO. 964) |
| SR225 | csasuaGfgGfAfUfcguccucaaa | L96 | usUfsugaGfgacgaucCfcUfaugsgsu |
| SR809 | (SEQ ID NO. 834) | AWH | (SEQ ID NO. 965) |
| SR229 | asuscaAfgGfCfUfcacuuaugga | L96 | usCfscauAfagugagcCfuUfgauscsu |
| SR774 | (SEQ ID NO. 835) | AWH | (SEQ ID NO. 966) |
| SR231 | usgsucCfaAfUfGfucuucaguca | L96 | usGfsacuGfaagacauUfgGfacasgsg |
| SR831 | (SEQ ID NO. 836) | AWH | (SEQ ID NO. 967) |
| SR234 | cscsacAfaUfAfCfaugcgcuaua | L96 | usAfsuagCfgcauguaUfuGfuggscsc |
| SR758 | (SEQ ID NO. 837) | AWH | (SEQ ID NO. 968) |
| SR235 | usasggGfaUfCfGfuccucaaaua | L96 | usAfsuuuGfaggacgaUfcCfcuasusg |
| SR807 | (SEQ ID NO. 838) | AWH | (SEQ ID NO. 969) |
| SR242 | asgsacUfcCfCfAfaggauaaaaa | L96 | usUfsuuuAfuccuuggGfaGfucususg |
| SR823 | (SEQ ID NO. 839) | AWH | (SEQ ID NO. 970) |
| SR246 | csusucAfgUfCfUfggccaugaaa | L96 | usUfsucaUfggccagaCfuGfaagsasc |
| SR803 | (SEQ ID NO. 840) | AWH | (SEQ ID NO. 971) |
| SR249 | asgsgaUfgGfAfGfgcccacaaca | L96 | usGfsuugUfgggccucCfaUfccuscsc |
| SR793 | (SEQ ID NO. 841) | AWH | (SEQ ID NO. 972) |
| SR250 | csascuCfaAfUfUfccugaacuaa | L96 | usUfsaguUfcaggaauUfgAfgugsasc |
| SR818 | (SEQ ID NO. 842) | AWH | (SEQ ID NO. 973) |
| SR251 | gsusucUfcAfUfUfccuugcacca | L96 | usGfsgugCfaaggaauGfaGfaacscsa |
| SR716 | (SEQ ID NO. 843) | AWH | (SEQ ID NO. 974) |
| SR252 | asasggUfgCfCfCfuauaaaggca | L96 | usGfsccuUfuauagggCfaCfcuusgsu |
| SR836 | (SEQ ID NO. 844) | AWH | (SEQ ID NO. 975) |
| SR254 | asascaAfaAfAfUfgaucuacaca | L96 | usGfsuguAfgaucauuUfuUfguususu |
| SR798 | (SEQ ID NO. 845) | AWH | (SEQ ID NO. 976) |
| SR261 | cscsugCfcAfCfCfcaacuuugga | L96 | usCfscaaAfguuggguGfgCfaggsgsu |
| SR715 | (SEQ ID NO. 846) | AWH | (SEQ ID NO. 977) |
| SR267 | usgscaGfuGfUfGfgccgucacaa | L96 | usUfsgugAfcggccacAfcUfgcascsa |
| SR741 | (SEQ ID NO. 847) | AWH | (SEQ ID NO. 978) |
| SR272 | asuscaAfgGfGfAfgggaugauca | L96 | usGfsaucAfucccuccCfuUfgausgsa |
| SR725 | (SEQ ID NO. 848) | AWH | (SEQ ID NO. 979) |
| SR276 | asusccAfaAfCfGfgccacaauaa | L96 | usUfsauuGfuggccguUfuGfgaususu |
| SR737 | (SEQ ID NO. 849) | AWH | (SEQ ID NO. 980) |
| SR279 | csasguGfuGfGfCfcgucacagua | L96 | usAfscugUfgacggccAfcAfcugscsa |
| SR753 | (SEQ ID NO. 850) | AWH | (SEQ ID NO. 981) |
| SR280 | csasagCfgCfCfCfcacagaccua | L96 | usAfsgguCfuguggggCfgCfuugscsc |
| SR794 | (SEQ ID NO. 851) | AWH | (SEQ ID NO. 982) |
| SR281 | csuscaCfuUfAfUfggaagccuaa | L96 | usUfsaggCfuuccauaAfgUfgagscsc |
| SR784 | (SEQ ID NO. 852) | AWH | (SEQ ID NO. 983) |
| SR282 | asasggAfcAfAfGfgugcccuaua | L96 | usAfsuagGfgcaccuuGfuCfcuuscsa |
| SR756 | (SEQ ID NO. 853) | AWH | (SEQ ID NO. 984) |
| SR285 | asgscaUfuUfCfCfaguacaucua | L96 | usAfsgauGfuacuggaAfaUfgcusgsg |
| SR841 | (SEQ ID NO. 854) | AWH | (SEQ ID NO. 985) |
| SR287 | asasuaUfaUfAfUfguuuaaccca | L96 | usGfsgguUfaaacauaUfaUfauusgsa |
| SR773 | (SEQ ID NO. 855) | AWH | (SEQ ID NO. 986) |
| SR289 | gscscaCfcCfAfAfcuuuggcaaa | L96 | usUfsugcCfaaaguugGfgUfggcsasg |
| SR720 | (SEQ ID NO. 856) | AWH | (SEQ ID NO. 987) |
| SR290 | csasugAfuUfUfUfccagcuugga | L96 | usCfscaaGfcuggaaaAfuCfaugsusa |
| SR746 | (SEQ ID NO. 857) | AWH | (SEQ ID NO. 988) |
| SR293 | gsusauGfgCfAfUfcaugccccua | L96 | usAfsgggGfcaugaugCfcAfuacsusg |
| SR791 | (SEQ ID NO. 858) | AWH | (SEQ ID NO. 989) |
| SR298 | ascscuGfaAfGfUfcauuggacca | L96 | usGfsgucCfaaugacuUfcAfggusgsg |
| SR740 | (SEQ ID NO. 859) | AWH | (SEQ ID NO. 990) |
| SR299 | gsascaAfgGfUfGfcccuauaaaa | L96 | usUfsuuaUfagggcacCfuUfgucscsu |
| SR751 | (SEQ ID NO. 860) | AWH | (SEQ ID NO. 991) |
| SR301 | uscsacUfuAfUfGfgaagccuaaa | L96 | usUfsuagGfcuuccauAfaGfugasgsc |
| SR719 | (SEQ ID NO. 861) | AWH | (SEQ ID NO. 992) |
| SR308 | asuscgUfcCfUfCfaaauccaaaa | L96 | usUfsuugGfauuugagGfaCfgauscsc |
| SR811 | (SEQ ID NO. 862) | AWH | (SEQ ID NO. 993) |
| SR313 | csuscaGfcAfUfUfgugaugacca | L96 | usGfsgucAfucacaauGfcUfgagsgsu |
| SR799 | (SEQ ID NO. 863) | AWH | (SEQ ID NO. 994) |
| SR317 | usgsgcCfgGfGfAfacacagacaa | L96 | usUfsgucUfguguuccCfgGfccasasg |
| SR821 | (SEQ ID NO. 864) | AWH | (SEQ ID NO. 995) |
| SR318 | ususgcAfcAfGfCfcuagcccuua | L96 | usAfsaggGfcuaggcuGfuGfcaasgsg |
| SR762 | (SEQ ID NO. 865) | AWH | (SEQ ID NO. 996) |
| SR324 | ascsccUfgCfCfAfcccaacuuua | L96 | usAfsaagUfuggguggCfaGfggusgsa |
| SR776 | (SEQ ID NO. 866) | AWH | (SEQ ID NO. 997) |
| SR329 | csusugCfaCfCfAfuagggaucga | L96 | usCfsgauCfccuauggUfgCfaagsgsa |
| SR820 | (SEQ ID NO. 867) | AWH | (SEQ ID NO. 998) |
| SR331 | gsgsagGfgAfUfGfaucaucauua | L96 | usAfsaugAfugaucauCfcCfuccscsu |
| SR788 | (SEQ ID NO. 868) | AWH | (SEQ ID NO. 999) |
| SR339 | asasuuCfcUfGfAfacuaaucaaa | L96 | usUfsugaUfuaguucaGfgAfauusgsa |
| SR770 | (SEQ ID NO. 869) | AWH | (SEQ ID NO. 1000) |
| SR341 | asgsaaCfuGfCfAfcaagaaacga | L96 | usCfsguuUfcuugugcAfgUfucususg |
| SR785 | (SEQ ID NO. 870) | AWH | (SEQ ID NO. 1001) |
| SR342 | csasccCfaAfCfUfuuggcaagca | L96 | usGfscuuGfccaaaguUfgGfgugsgsc |
| SR754 | (SEQ ID NO. 871) | AWH | (SEQ ID NO. 1002) |
| SR343 | uscsauUfcCfUfUfgcaccauaga | L96 | usCfsuauGfgugcaagGfaAfugasgsa |
| SR781 | (SEQ ID NO. 872) | AWH | (SEQ ID NO. 1003) |
| SR344 | uscsaaAfuCfCfAfaacggccaca | L96 | usGfsuggCfcguuuggAfuUfugasgsg |
| SR830 | (SEQ ID NO. 873) | AWH | (SEQ ID NO. 1004) |

*siRNA modifications:
Nf = 2′-fluoro RNA;
n = 2′-OMe-RNA;
s = phosphorothioate;
(vinu) = vinyl-phosphonate 2′-OMe-uracil

Exemplary siRNAs Targeting Rodent SLC10A1 Transcripts

[0142] In some embodiments, the present invention further provides siRNA molecules targeting one or more SLC10A1 mRNA transcripts from one or more species. The siRNA is herein referred to as “surrogate siRNA.” In some embodiments, the surrogate siRNA has cross-reactivities to mouse and rat SLC10A1 mRNA transcripts. In some embodiments, the surrogate siRNA has cross-reactivities to human and rat SLC10A1 mRNA transcripts. In some embodiments, the surrogate siRNA has cross-reactivities to human and mouse SLC10A1 mRNA transcripts. In some embodiments, the surrogate siRNA has cross-reactivities to human, mouse and rat SLC10A1 mRNA transcripts. In some embodiments, the surrogate siRNA has cross-reactivities to human, cynomolgus monkey and mouse SLC10A1 mRNA transcripts. In some embodiments, the surrogate siRNA has cross-reactivities to human, cynomolgus monkey and rat SLC10A1 mRNA transcripts. For example, a surrogate siRNA specifically targets a rodent (e.g., mouse and rat) SLC10A1 mRNA transcript may be used as a research tool to study efficacy and/or target engagement in a rodent model.

[0143] In some embodiments, the surrogate siRNA is a 19-mer full match with mouse SLC10A1 mRNA transcript. In some embodiments, the surrogate siRNA is a 19-mer full match with mouse and rat SLC10A1 mRNA transcripts. In some embodiments, the surrogate siRNA is a 19-mer full match with human and mouse SLC10A1 mRNA transcripts. In some embodiments, the surrogate siRNA is a 19-mer full match with human and rat SLC10A1 mRNA transcripts. In some embodiments, the surrogate siRNA is a 19-mer full match with human, cynomolgus monkey and mouse SLC10A1 mRNA transcripts. In some embodiments, the surrogate siRNA is a 19-mer full match with human, cynomolgus monkey and rat SLC10A1 mRNA transcripts.

[0144] In some embodiments, a surrogate SLC10A1-targeting siRNA that is a full-match for rodent and human may differ in pharmacological effects for each species, and therefore may be more optimal in rodents than humans.

[0145] In some embodiments, the surrogate siRNA is modified with 2′-O-methyl, 2′-F, 5′-vinylphosphonate and phosphorothioate linkages. In some embodiments, the surrogate siRNA is conjugated with the L96 GalNAc on the 3′-end of the sense strand. In some embodiments, the surrogate siRNA is conjugated with the AWH GalNAc on the 3′-end of the sense strand.

[0146] Exemplary siRNA molecules targeting rodent SLC10A1 mRNA transcripts comprises a pair of a modified sense strand and a modified antisense strand in Table 6.

TABLE 6
Exemplary modified surrogate siRNAs

| | | GalNAc | | |
|---|---|---|---|---|
| | | at the | | |
| | | 3′end of | Antisense Strand (AS) | |
| Duplex | Sense (S) Strand Sequence | the S | sequence | |
| ID | (5′ to 3′) | strand | (5′ to 3′) | Species |
| SR844 | gsascaAfgGfUfGfcccuacaaaa | L96 | (vinu)sUfsuugUfagggcacCf | Mouse, Rat |
| SR888 | (SEQ ID NO. 1005) | AWH | uUfgucscsu | |
| | | | (SEQ ID NO. 1049) | |
| SR845 | gscsccUfaCfAfAfaggcauuaua | L96 | (vinu)sAfsuaaUfgccuuugUf | Mouse, Rat |
| SR889 | (SEQ ID NO. 1006) | AWH | aGfggcsasc | |
| | | | (SEQ ID NO. 1050) | |
| SR846 | gscscaCfaCfUfAfuguacccuaa | L96 | (vinu)sUfsaggGfuacauagUf | Mouse, Rat |
| SR890 | (SEQ ID NO. 1007) | AWH | gUfggcscsu | |
| | | | (SEQ ID NO. 1051) | |
| SR847 | csasgcAfuCfAfUfguucgucaua | L96 | (vinu)sAfsugaCfgaacaugAf | Mouse, Rat |
| SR891 | (SEQ ID NO. 1008) | AWH | uGfcugsusu | |
| | | | (SEQ ID NO. 1052) | |
| SR848 | gsusucGfuCfAfUfgacaccacaa | L96 | (vinu)sUfsgugGfugucaugAf | Mouse, Rat |
| SR892 | (SEQ ID NO. 1009) | AWH | cGfaacsasu | |
| | | | (SEQ ID NO. 1053) | |
| SR849 | csgsucAfuGfAfCfaccacacuua | L96 | (vinu)sAfsaguGfuggugucAf | Mouse, Rat |
| SR893 | (SEQ ID NO. 1010) | AWH | uGfacgsasa | |
| | | | (SEQ ID NO. 1054) | |
| SR850 | csasgaCfgCfAfCfcaucagcaua | L96 | (vinu)sAfsugcUfgauggugCf | Mouse, Rat |
| SR894 | (SEQ ID NO. 1011) | AWH | gUfcugscsa | |
| | | | (SEQ ID NO. 1055) | |
| SR851 | csusguUfcUfAfCfcauccucaaa | L96 | (vinu)sUfsugaGfgaugguaGf | Mouse, Rat |
| SR895 | (SEQ ID NO. 1012) | AWH | aAfcagsasg | |
| | | | (SEQ ID NO. 1056) | |
| SR852 | gscsguCfaUfUfCfugguaguuaa | L96 | (vinu)sUfsaacUfaccagaaUfg | Mouse |
| SR896 | (SEQ ID NO. 1013) | AWH | Afcgcsusg | |
| | | | (SEQ ID NO. 1057) | |
| SR853 | csgsucAfuUfCfUfgguaguuaua | L96 | (vinu)sAfsuaaCfuaccagaAf | Mouse |
| SR897 | (SEQ ID NO. 1014) | AWH | uGfacgscsu | |
| | | | (SEQ ID NO. 1058) | |
| SR854 | csasuuCfuGfGfUfaguuauguua | L96 | (vinu)sAfsacaUfaacuaccAfg | Mouse |
| SR898 | (SEQ ID NO. 1015) | AWH | Afaugsasc | |
| | | | (SEQ ID NO. 1059) | |
| SR855 | gsgsugAfuCfAfUfcgccauagua | L96 | (vinu)sAfscuaUfggcgaugAf | Mouse |
| SR899 | (SEQ ID NO. 1016) | AWH | uCfaccscsc | |
| | | | (SEQ ID NO. 1060) | |
| SR856 | gsgsccCfaGfUfAfcgguaucaua | L96 | (vinu)sAfsugaUfaccguacUf | Mouse |
| SR900 | (SEQ ID NO. 1017) | AWH | gGfgccsasc | |
| | | | (SEQ ID NO. 1061) | |
| SR857 | csasucUfaCfAfGfcaaaggaaua | L96 | (vinu)sAfsuucCfuuugcugUf | Mouse |
| SR901 | (SEQ ID NO. 1018) | AWH | aGfaugsusa | |
| | | | (SEQ ID NO. 1062) | |
| SR858 | csusacGfaCfGfGfagaucuuaaa | L96 | (vinu)sUfsuaaGfaucuccgUf | Mouse |
| SR902 | (SEQ ID NO. 1019) | AWH | cGfuagsasu | |
| | | | (SEQ ID NO. 1063) | |
| SR859 | cscsuaCfaAfAfGfgcauuaugua | L96 | (vinu)sAfscauAfaugccuuUf | Mouse |
| SR903 | (SEQ ID NO. 1020) | AWH | gUfaggsgsc | |
| | | | (SEQ ID NO. 1064) | |
| SR860 | csusacAfaAfGfGfcauuauguua | L96 | (vinu)sAfsacaUfaaugccuUf | Mouse |
| SR904 | (SEQ ID NO. 1021) | AWH | uGfuagsgsg | |
| | | | (SEQ ID NO. 1065) | |
| SR861 | csascuCfgUfCfAfugguucucaa | L96 | (vinu)sUfsgagAfaccaugaCf | Mouse |
| SR905 | (SEQ ID NO. 1022) | AWH | gAfgugsasu | |
| | | | (SEQ ID NO. 1066) | |
| SR862 | csasggCfaUfGfAfucaucacuua | L96 | (vinu)sAfsaguGfaugaucaUf | Mouse |
| SR906 | (SEQ ID NO. 1023) | AWH | gCfcugscsc | |
| | | | (SEQ ID NO. 1067) | |
| SR863 | gsgscaUfgAfUfCfaucacuuuca | L96 | (vinu)sGfsaaaGfugaugauCf | Mouse |
| SR907 | (SEQ ID NO. 1024) | AWH | aUfgccsusg | |
| | | | (SEQ ID NO. 1068) | |
| SR864 | gscsucUfcUfUfCfcgacuaaaua | L96 | (vinu)sAfsuuuAfgucggaaGf | Mouse |
| SR908 | (SEQ ID NO. 1025) | AWH | aGfagcsasg | |
| | | | (SEQ ID NO. 1069) | |
| SR865 | csgsucCfaAfCfUfcuguucuaca | L96 | (vinu)sGfsuagAfacagaguUf | Mouse |
| SR909 | (SEQ ID NO. 1026) | AWH | gGfacgsusu | |
| | | | (SEQ ID NO. 1070) | |
| SR866 | cscsaaCfuCfUfGfuucuaccaua | L96 | (vinu)sAfsuggUfagaacagAf | Mouse |
| SR910 | (SEQ ID NO. 1027) | AWH | gUfuggsasc | |
| | | | (SEQ ID NO. 1071) | |
| SR867 | cscsggUfgCfUfAfuuugaaaaua | L96 | (vinu)sAfsuuuUfcaaauagCf | Mouse |
| SR911 | (SEQ ID NO. 1028) | AWH | aCfcggsasa | |
| | | | (SEQ ID NO. 1072) | |
| SR868 | gsasacCfuCfAfGfcauugugaua | L96 | (vinu)sAfsucaCfaaugcugAf | Human, Mouse |
| SR912 | (SEQ ID NO. 1029) | AWH | gGfuucsasu | |
| | | | (SEQ ID NO. 1073) | |
| SR869 | csusgaAfgUfCfAfuuggaccaca | L96 | (vinu)sGfsuggUfccaaugaCf | Human, Mouse |
| SR913 | (SEQ ID NO. 1030) | AWH | uUfcagsgsu | |
| | | | (SEQ ID NO. 1074) | |
| SR870 | gsusucUfcAfUfUfccuugcacca | L96 | (vinu)sGfsgugCfaaggaauGf | Human, Rat |
| SR914 | (SEQ ID NO. 1031) | AWH | aGfaacscsa | |
| | | | (SEQ ID NO. 1075) | |
| SR871 | ususcuCfaUfUfCfcuugcaccaa | L96 | (vinu)sUfsgguGfcaaggaaUf | Human, Rat |
| SR915 | (SEQ ID NO. 1032) | AWH | gAfgaascsc | |
| | | | (SEQ ID NO. 1076) | |
| SR872 | csuscaUfuCfCfUfugcaccauaa | L96 | (vinu)sUfsaugGfugcaaggAf | Human, Rat |
| SR916 | (SEQ ID NO. 1033) | AWH | aUfgagsasa | |
| | | | (SEQ ID NO. 1077) | |
| SR873 | ususgcAfcCfAfUfagggaucgua | L96 | (vinu)sAfscgaUfcccuaugGf | Human, Rat |
| SR917 | (SEQ ID NO. 1034) | AWH | uGfcaasgsg | |
| | | | (SEQ ID NO. 1078) | |
| SR874 | usgscaCfcAfUfAfgggaucguca | L96 | (vinu)sGfsacgAfucccuauGf | Human, Rat |
| SR918 | (SEQ ID NO. 1035) | AWH | gUfgcasasg | |
| | | | (SEQ ID NO. 1079) | |
| SR875 | uscscuCfuAfCfAfugauuuucca | L96 | (vinu)sGfsgaaAfaucauguAf | Human, Rat |
| SR919 | (SEQ ID NO. 1036) | AWH | gAfggasgsg | |
| | | | (SEQ ID NO. 1080) | |
| SR876 | uscsuaCfaUfGfAfuuuuccagca | L96 | (vinu)sGfscugGfaaaaucaUf | Human, Rat |
| SR920 | (SEQ ID NO. 1037) | AWH | gUfagasgsg | |
| | | | (SEQ ID NO. 1081) | |
| SR877 | gsgscuGfcAfCfCfauggaguuca | L96 | (vinu)sGfsaacUfccaugguGf | Human, |
| SR921 | (SEQ ID NO. 1038) | AWH | cAfgccscsa | Cynomolgus |
| | | | (SEQ ID NO. 1082) | monkey, Mouse |
| SR878 | csuscaGfcAfUfUfgugaugacca | L96 | (vinu)sGfsgucAfucacaauGf | Human, |
| SR922 | (SEQ ID NO. 1039) | AWH | cUfgagsgsu | Cynomolgus |
| | | | (SEQ ID NO. 1083) | monkey, Mouse |
| SR319 | uscsagCfaUfUfGfugaugaccaa | L96 | (vinu)sUfsgguCfaucacaaUf | Human, |
| SR477 | (SEQ ID NO. 122) | AWH | gCfugasgsg | Cynomolgus |
| | | | (SEQ ID NO. 332) | monkey, Mouse |
| SR879 | csasgcAfuUfGfUfgaugaccaca | L96 | (vinu)sGfsuggUfcaucacaAf | Human, |
| SR923 | (SEQ ID NO. 1040) | AWH | uGfcugsasg | Cynomolgus |
| | | | (SEQ ID NO. 1084) | monkey, Mouse |
| SR880 | uscsauUfcCfUfUfgcaccauaga | L96 | (vinu)sCfsuauGfgugcaagGf | Human, |
| SR924 | (SEQ ID NO. 1041) | AWH | aAfugasgsa | Cynomolgus |
| | | | (SEQ ID NO. 1085) | monkey, |
| | | | | Rat |
| SR881 | csasuuCfcUfUfGfcaccauagga | L96 | (vinu)sCfscuaUfggugcaaGf | Human, |
| SR925 | (SEQ ID NO. 1042) | AWH | gAfaugsasg | Cynomolgus |
| | | | (SEQ ID NO. 1086) | monkey, |
| | | | | Rat |
| SR882 | asusucCfuUfGfCfaccauaggga | L96 | (vinu)sCfsccuAfuggugcaAf | Human, |
| SR926 | (SEQ ID NO. 1043) | AWH | gGfaausgsa | Cynomolgus |
| | | | (SEQ ID NO. 1087) | monkey, |
| | | | | Rat |
| SR883 | cscsuuGfcAfCfCfauagggauca | L96 | (vinu)sGfsaucCfcuaugguGf | Human, |
| SR927 | (SEQ ID NO. 1044) | AWH | cAfaggsasa | Cynomolgus |
| | | | (SEQ ID NO. 1088) | monkey, |
| | | | | Rat |
| SR884 | csusugCfaCfCfAfuagggaucga | L96 | (vinu)sCfsgauCfccuauggUf | Human, |
| SR928 | (SEQ ID NO. 1045) | AWH | gCfaagsgsa | Cynomolgus |
| | | | (SEQ ID NO. 1089) | monkey, |
| | | | | Rat |
| SR885 | gscsacCfaUfAfGfggaucgucca | L96 | (vinu)sGfsgacGfaucccuaUf | Human, |
| SR929 | (SEQ ID NO. 1046) | AWH | gGfugcsasa | Cynomolgus |
| | | | (SEQ ID NO. 1090) | monkey, |
| | | | | Rat |
| SR886 | csasccAfuAfGfGfgaucguccua | L96 | (vinu)sAfsggaCfgaucccuAf | Human, |
| SR930 | (SEQ ID NO. 1047) | AWH | uGfgugscsa | |
| | | | (SEQ ID NO. 1091) | Cynomolgus |
| | | | | monkey, |
| | | | | Rat |
| SR887 | ascscaUfaGfGfGfaucguccuca | L96 | (vinu)sGfsaggAfcgaucccUf | Human, |
| SR931 | (SEQ ID NO. 1048) | AWH | aUfggusgsc | Cynomolgus |
| | | | (SEQ ID NO. 1092) | monkey, |
| | | | | Rat |

*siRNA modifications:
Nf = 2′-fluoro RNA;
n = 2′-OMe-RNA;
s = phosphorothioate;
(vinu) = vinyl-phosphonate 2′-OMe-uracil

### Pharmaceutical Compositions

[0147] The siRNA molecules and compositions thereof described herein may be formulated in pharmaceutical compositions. Such a pharmaceutical composition may be provided in a form suitable for administration to a subject, and may be comprise one or more pharmaceutically acceptable carriers, one or more additional ingredients, or some combination of these. The concentrations of the siRNA molecules and pharmaceutical carriers can be determined by experimentation. It should be understood that, although the particles, formulations, compositions and methods in this section are discussed largely with regard to siRNA molecules, these particles, formulations, compositions and methods can be practiced with other modified siRNA compounds.

[0148] In some embodiments, the siRNA molecules may be formulated for pharmaceutical use. Pharmaceutically acceptable compositions comprise a therapeutically-effective amount of one or more of the siRNA molecules in any of the preceding embodiments, taken alone or formulated together with one or more pharmaceutically acceptable carriers (additives), excipient and/or diluents.

[0149] In some embodiments, the composition is a pharmaceutical composition.

[0150] Pharmaceutical compositions that are useful in the methods of the invention may be suitably developed for inhalational, oral, rectal, vaginal, parenteral, topical, transdermal, pulmonary, intranasal, buccal, ophthalmic, intrathecal, transdermal, nasal, inhalation, endotrache, intravenous, subcutaneous, intramuscular, epidural injection, or another route of administration.

[0151] In some embodiments, the pharmaceutical compositions may be specially formulated for administration in solid or liquid form, e.g., drenches (aqueous or non-aqueous solutions or suspensions), tablets, sterile solutions, suspensions, sustained-release formulations, cream, ointment, controlled-release patch or spray.

[0152] In some embodiments, the pharmaceutical composition is sterile.

[0153] Other contemplated formulations include projected nanoparticles, liposomal preparations, rescaled erythrocytes containing the active ingredient, and immunologically-based formulations. The route(s) of administration will be readily apparent to the skilled artisan and will depend upon any number of factors including the type and severity of the disease being treated, the type and age of the veterinary or human patient being treated, and the like.

[0154] The formulations of the pharmaceutical compositions described herein may be prepared by any method known or hereafter developed in the art of pharmacology. In general, such preparatory methods include the step of bringing the active ingredient into association with a carrier or one or more other accessory ingredients, and then, if necessary or desirable, shaping or packaging the product into a desired single- or multi-dose unit.

[0155] In some embodiments, the compositions of the invention are formulated using one or more pharmaceutically acceptable excipients or carriers. In one embodiment, the pharmaceutical compositions of the invention comprise a therapeutically effective amount of at least one compound of the invention and a pharmaceutically acceptable carrier. Pharmaceutically acceptable carriers, which are useful, include, but are not limited to, glycerol, water, saline, phosphate-buffered saline, ethanol and other pharmaceutically acceptable salt solutions such as phosphates and salts of organic acids. Examples of these and other pharmaceutically acceptable carriers are described in Remington's Pharmaceutical Sciences (1991, Mack Publication Co., New Jersey).

[0156] The formulations may be presented in unit dosage form. The amount of active ingredient which can be combined with a carrier material to produce a single dosage form will vary depending upon the host being treated, the particular mode of administration. The amount of active ingredient which can be combined with a carrier material to produce a single dosage form will generally be that amount of the compound which produces a therapeutic effect. The amount of the active ingredient (i.e., a siRNA) may range from about 0.1% to about 99% percent, from about 5% to about 80%, from 10% to 70%, from 20% to 60%, or from 30% to 50%.

[0157] In some embodiments, the siRNAs may be formulated in combination with another agent, e.g., another therapeutic agent or an agent that stabilizes the siRNA, e.g., a protein that complexes with the siRNA to form particle.

[0158] The compositions disclosed herein can be administered parenterally such as, for example, by intravenous, intramuscular, intrathecal or subcutaneous injection. Parenteral administration can be accomplished by incorporating the compositions into a solution or suspension. Such solutions or suspensions may also include sterile diluents such as water for injection, saline solution, phosphate-buffered saline, fixed oils, polyethylene glycols, glycerine, propylene glycol or other synthetic solvents. Parenteral formulations may also include antibacterial agents such as, for example, benzyl alcohol or methyl parabens, antioxidants such as, for example, ascorbic acid or sodium bisulfite and chelating agents such as EDTA. Buffers such as acetates, citrates or phosphates and agents for the adjustment of tonicity such as sodium chloride or dextrose may also be added. The parenteral preparation can be enclosed in ampules, disposable syringes or multiple dose vials made of glass or plastic.

[0159] In one embodiment, the siRNA described herein is formulated with lipid nanoparticle (LNP).

[0160] In some embodiments, the compositions are prepared in a solid lyophilized form that can be stored and reconstituted to provide a formulation for administration of treatment. Any process for preparing a solid lyophilized drug product known in the art may be used to prepare the lyophilized products described herein (e.g., U.S. Pat. No. 10,300,018). In some aspects, the lyophilized products are stored until ready to be administration. For example, the lyophilized products comprising a nucleic acid therapeutic described herein can be stored at 4° C. and/or −20° C. In some embodiments, the solid lyophilized products can be reconstituted in sterile water to form a syringible formulation for administration. In some embodiments, the solid lyophilized products can be reconstituted in phosphate buffered saline to form a syringible formulation for administration. Accordingly, the present disclosure further contemplates formulations made by reconstitution of the solid lyophilized products.

### Applications and Methods of Use

[0161] In accordance with the present disclosure, the siRNA molecules, and pharmaceutical compositions thereof are used for treating diseases and/or disorders that are associated with NTCP activities, e.g., a cholestatic disorder, hepatitis B, hepatitis D, metabolic dysfunction-associated steatotic liver disease (MASLD), metabolic dysfunction-associated steatohepatitis (MASH), MASLD and increased alcohol intake (MetALD).

[0162] In accordance with the present disclosure, the siRNA molecules, and pharmaceutical compositions thereof are used for treating or preventing diseases and/or disorders that may benefit from knockdown of sodium taurocholate co-transporting polypeptide (NTCP), e.g., diabetes, obesity, dyslipidemia, constipation, and inflammatory bowel disease.

[0163] In accordance with the present disclosure, the siRNA molecules, and pharmaceutical compositions thereof are used for treating complications of a disease and/or disorder described herein (e.g., in treatment or prevention of a complication or symptom of the disease or disorder). Exemplary complications include any or all of: malnutrition, pruritis, pain, hypertension, progressive liver damage, jaundice, nausea, and/or emesis.

[0164] In some embodiments, the siRNA molecules and pharmaceutical compositions thereof are used for treating pain (e.g., pain associated with or resulting from a disease and/or disorder described herein). In embodiments, pain is abdominal pain.

[0165] In some embodiments, the siRNA molecules and pharmaceutical compositions thereof are used for treating progressive liver damage (e.g., progressive liver damage associated with or resulting from a disease or disorder described herein). In embodiments, progressive liver damage is liver inflammation, liver fibrosis, liver cirrhosis, and/or liver failure.

[0166] In some embodiments, methods for repressing the expression of a SLC10A1 mRNA transcript in a cell, liver or a subject are provided. The method comprises applying to the siRNA of the present disclosure, to the cell, the liver or the subject. The expression repression of the SLC10A1 mRNA transcript in the cell, liver and/or the subject is beneficial for treating a NTCP associated disease (e.g., a cholestatic disorder, hepatitis B, hepatitis D, MAFLD, MASH and MetALD.

[0167] The expression of a SLC10A1 mRNA transcript after treatment with a siRNA molecule described herein, may be reduced from about 10% to about 100% as compared to the normal expression level of the hSLC10A1 mRNA transcript before administration. In some embodiments, the SLC10A1 mRNA transcript expression is reduced from about 10% to 95%, or from about 15% to 95%, or from about 20% to 95%, or from about 25% to 95%, or from about 30% to 95%, or from about 35% to 95%, or from about 40% to 95%, or from about 45% to 95%, or from about 50% to 95%, or from 60% to 95%, or from 10% to 85%, or from about 20% to 80%, or from about 25% to 80%, or from about 30% to 80%, or from about 40% to 75%, or from about 45% to 60%. For example, the SLC10A1 mRNA transcript expression in the cell, the liver or the subject is reduced about 10%. In some embodiments, the SLC10A1 mRNA transcript expression in the cell, the liver or the subject is reduced about 15%. In some embodiments, the SLC10A1 mRNA transcript expression in the cell, the liver or the subject is reduced about 20%. In some embodiments, the SLC10A1 mRNA transcript expression in the cell, the liver or the subject is reduced about 25%. In some embodiments, the SLC10A1 mRNA transcript expression in the cell, the liver or the subject is reduced about 30%. In some embodiments, the SLC10A1 mRNA transcript expression in the cell, the liver or the subject is reduced about 35%. In some embodiments, the SLC10A1 mRNA transcript expression in the cell, the liver or the subject is reduced about 40%. In some embodiments, the SLC10A1 mRNA transcript expression in the cell, the liver or the subject is reduced about 45%. In some embodiments, the SLC10A1 mRNA transcript expression in the cell, the liver or the subject is reduced about 50%. In some embodiments, the SLC10A1 mRNA transcript expression in the cell, the liver or the subject is reduced about 55%. In some embodiments, the SLC10A1 mRNA transcript expression in the cell, the liver or the subject is reduced about 60%. In some embodiments, the SLC10A1 mRNA transcript expression in the cell, the liver or the subject is reduced about 65%. In some embodiments, the SLC10A1 mRNA transcript expression in the cell, the liver or the subject is reduced about 70%. In some embodiments, the SLC10A1 mRNA transcript expression in the cell, the liver or the subject is reduced about 75%. In some embodiments, the SLC10A1 mRNA transcript expression in the cell, the liver or the subject is reduced about 80%. In some embodiments, the SLC10A1 mRNA transcript expression in the cell, the liver or the subject is reduced about 85%. In some embodiments, the SLC10A1 mRNA transcript expression in the cell, the liver or the subject is reduced about 90%. In some embodiments, the SLC10A1 mRNA transcript expression in the cell, the liver or the subject is reduced about 95%. In some embodiments, the SLC10A1 mRNA transcript expression in the cell, the liver or the subject is reduced about 96%. In some embodiments, the SLC10A1 mRNA transcript expression in the cell, the liver or the subject is reduced about 97%. In some embodiments, the SLC10A1 mRNA transcript expression in the cell, the liver or the subject is reduced about 98%. In some embodiments, the SLC10A1 mRNA transcript expression in the cell, the liver or the subject is reduced about 99%.

### Cholestatic Disorders

[0168] In some embodiments, the present disclosure provides a method of treating a cholestatic disorder in a patient in need; the method comprises administering to the patient the siRNA molecules, pharmaceutical compositions thereof described herein. The cholestatic disorder is selected from the group consisting of progressive intrahepatic familial cholestasis (PFIC), Alagille syndrome (ALGS), biliary atresia (BA), primary biliary cholangitis (PBC), primary sclerosing cholangitis (PSC), and intrahepatic cholestasis of pregnancy (ICP). Other chronic cholestatic disorders include bile acid synthesis defects, cystic fibrosis related liver disease, ductal plate abnormalities including Caroli syndrome and congenital hepatic fibrosis, and certain metabolic diseases.

[0169] In some embodiments, provided includes a method for treating PBC and/or PSC in a patient in need thereof comprising administering to the patient in need an effective amount of the siRNA described herein, or a pharmaceutical composition thereof. Primary biliary cholangitis (PBC), previously called primary biliary cirrhosis, and primary sclerosing cholangitis (PSC) are both slow progressive chronic cholestatic liver diseases. PBC is mainly characterized by the granulomatous destruction of small intrahepatic bile ducts, whereas PSC is characterized by inflammation and fibrosis of the intrahepatic and extrahepatic bile ducts, which lead to multiple bile duct stenosis. Both PBC and PSC have autoimmune triggers for bile duct damage, and may lead to cirrhosis and liver failure after a certain period of time.

[0170] In some embodiments, provided includes a method for treating PFIC in a patient in need thereof comprising administering to the patient in need an effective amount of the siRNA described herein, or a pharmaceutical composition thereof. PFIC is a pediatric disorder caused by mutations in transporters that control bile flow. PFIC occurs within the first three months of life. There are four types of PFIC: type 1, type 2, type 3, or type 4. Type 1 and Type 2 PFIC are most common. In some embodiments, the methods described herein treat Type 1, Type 2, Type 3, Type 4, Type 5 and/or Type 6 PFIC.

[0171] In some embodiments, provided includes a method for treating ALGS in a patient in need thereof comprising administering to the patient in need an effective amount of the siRNA described herein, or a pharmaceutical composition thereof. ALGS is a pediatric disorder caused by mutations in the NOTCH2 and JAG1 genes which result in narrow, malformed, or deficient bile ducts. In some embodiments, a patient with ALGS has a loss of function mutation in JAG1 or NOTCH2. Patients with ALGS exhibit cholestasis and multisystem problems. In some embodiments, patients experience early onset ALGS. Early onset ALGS may occur during infancy.

[0172] In some embodiments, provided includes a method for treating biliary atresia (BA) in a patient in need thereof comprising administering to the patient in need an effective amount of the siRNA described herein, or a pharmaceutical composition thereof. BA is a pediatric disorder caused by neuro-inflammatory destructions of intra- or extra-hepatic bile ducts in infants. BA typically occurs between 2 to 8 weeks after birth. Currently, BA is fatal without a Kasai procedure. BA is the number one cause of pediatric liver transplant.

[0173] In some embodiments, provided includes a method for treating ICP in a patient in need thereof comprising administering to the patient in need an effective amount of the siRNA described herein, or a pharmaceutical composition thereof. ICP involves a combination of genetic susceptibility, hormonal, and environmental factors. In some embodiments, provided herein is a method of treating a pregnant female patient with ICP.

[0174] In some embodiments, provided includes a method for treating cholestasis caused by another disease or procedure in a patient in need thereof comprising administering to the patient in need an effective amount of the siRNA described herein, or a pharmaceutical composition thereof. In some patients receiving a liver transplant, cholestasis after transplantation is observed. In some patients with malignant tumors, biliary obstruction can lead to cholestasis.

[0175] In some embodiments, the patient is an adult. In some embodiments, the patient is a pediatric patient.

[0176] In some embodiments, provided includes a method for treating disorders and/or diseases in which the knockdown of NTCP may benefit a patient in need thereof, e.g., obesity, diabetes, dyslipidemia, constipation and/or inflammatory bowel disease (IBD), comprising administering to the patient in need an effective amount of the siRNA described herein, or a pharmaceutical composition thereof.

### Hepatitis B and D Infection and Diseases

[0177] In some embodiments, the present disclosure provides a method of treating Hepatitis B and/or Hepatitis D in a patient in need; the method comprises administering to the patient the siRNA molecules, pharmaceutical compositions thereof described herein.

[0178] In some embodiments, the present disclosure provides a method of curing Hepatitis B and/or Hepatitis D in a patient in need; the method comprises administering to the patient the siRNA molecules, pharmaceutical compositions thereof described herein.

[0179] In some embodiments, the patients in need are Hepatitis B antigen (HBeAg)-positive patients. In other embodiments, the patients in need HbeAg-negative patients.

[0180] In some embodiments, the treatment continues for at least 3 months, or at least 6 months, at least one year, or life-long. In some embodiments, a long-lasting response after the treatment is discontinued is achieved in the treated patient.

### Other Indications

[0181] In some embodiments, the siRNA molecules, and compositions thereof may be used for treating other indications involving bile acid deficiency or associated with NTCP functions. In some embodiments, the present disclosure further provides a method for treating metabolic dysfunction-associated steatotic liver disease (MASLD) in a patient in need comprising administering to the patient in need an effective amount of the siRNA described herein, or a pharmaceutical composition thereof. In some embodiments, the present disclosure further provides a method for treating MASLD and increased alcohol intake (MetALD) in a patient in need comprising administering to the patient in need an effective amount of the siRNA described herein, or a pharmaceutical composition thereof. In other cases, the present disclosure further provides a method for treating metabolic dysfunction-associated steatohepatitis (MASH) in a patient in need comprising administering to the patient in need an effective amount of the siRNA described herein, or a pharmaceutical composition thereof. MAFLD is a condition in which fat builds up in a patient's liver. MASH is an advanced form of MAFLD. MetALD is a form of MASLD associated with increased alcohol intake.

### Combination Therapies

[0182] In some embodiments, the present compounds, composition and methods can be used in combination with other active ingredients. The term “in combination” means either a co-therapy or combination therapy, or a co-formulation in a single pharmaceutical form, or in a single commercial package, for example a kit or a blister of two or more active ingredients.

[0183] In one aspect, another therapy that targets the bile acid metabolism pathway may be used in combination with the present compound, compositions and/or methods for treating a cholestatic disorder.

[0184] In some embodiments, the siRNA molecules, and compositions and methods thereof may be used in combination with one or more therapies for treating PBC in a patient in need, such as Ursodeoxycholic Acid (UDCA), and Obeticholic Acid (OCA).

[0185] In some embodiments, the siRNA molecules, and compositions and methods thereof may be used in combination with one or more therapies for treating PSC in a patient in need, such as UDCA.

[0186] In some embodiments, the siRNA molecules, and compositions and methods thereof may be used in combination with one or more therapies for treating PFIC in a patient in need, such as UDCA, IBAT (ileal bile acid transport) inhibitors and/or in combination with a surgical treatment of PFIC (e.g., partial external biliary diversion (PEBD)).

[0187] In some embodiments, the siRNA molecules, and compositions and methods thereof may be used in combination with one or more therapies for treating Alagille syndrome (ALGS), such as UDCA that improves the flow of bile from the liver to the small intestine, and/or other medicines that can help to treat liver and itch skin symptoms in patients with ALGS such as IBAT inhibitors.

[0188] In some embodiments, the siRNA molecules, and compositions and methods thereof may be used in combination with other treatment methods of biliary atresia (BA) in a patient in need, such as a surgical procedure called Kasai procedure.

[0189] In some embodiments, the siRNA molecules, and compositions and methods thereof may be used in combination with one or more medications for treating intrahepatic cholestasis of pregnancy (ICP) in a patient in need, such as UDCA.

[0190] Other therapies for treating a cholestatic disorder include Nor-UDCA, cholic acid, Rifampin, Bile acid sequestrants, chemical chaperones, IBAT (ileal bile acid transport) inhibitors, FXR and TGR5 agonists, FGF19 analog, and anti-inflammatory therapies.

[0191] The IBAT inhibitors include eloixibat, linerixibat, odevixibat, maralixibat and the like.

[0192] In another aspect, the siRNA molecules, compositions and methods as described herein may be used in combination with one or more anti-viral therapies for treating or curing hepatitis B and/or hepatitis D.

[0193] In some embodiments, the siRNA molecules, compositions and methods as described herein may be used in combination with one or more antiviral agents, including but not limited to interferons (for example Intron A, Pegasys), nucleoside and nucleotide analogs that interfere with DNA polymerases (for example Lamivudine, Adefovir, tenofovir, entecavir and the like), siRNA drugs that target part of the viral genome (for example VIR-2218, RG6346, JNJ-3989 and the like), entry inhibitors that may be additive or potentially synergistic with the siRNA described herein (for example beluvirtide, hzVSF, Albireo 2342, AB-543 and the like), capsid or core inhibitors (for example morphothiadin, JNJ 56136379, EDP-514 and the like), S-antigen inhibitors (for example REP 2139, BJT-574 and the like), antisense molecules that target the viral mRNA (such as bepirovirsen and the like), gene editing agents, therapeutic vaccines, monoclonal antibodies that neutralize HBV or HDV proteins, and prenylation inhibitors (such as lonafarnib).

[0194] In some embodiments, a subject in need may receive a preventive vaccine against hepatitis B and/or D. The subject may further receive a treatment with the siRNA molecules and pharmaceutical compositions thereof as described herein. The preventive vaccine may include but are not limited to hepatitis B vaccine, hepatitis D vaccine and hepatitis B immunoglobulin.

[0195] In some embodiments, the siRNA molecules, compositions and methods as described herein may be used in combination with one or more viral suppressive medications. Exemplary antiviral medications for hepatitis B include entecavir, tenofovir, lamivudine, adefovir and telbivudine. In some cases, the antiviral medications are nucleos(t)ide analogs (Nas). In some cases, the antiviral medications are peginterferon (PEG-IFN).

[0196] In some embodiments, the siRNA molecules, compositions and methods as described herein may be used in combination with one or more immunomodulatory therapies. As immune response is suppressed in chronic HBV infection, restoration of the immune response is crucial for improving the chronic infection outcome of hepatitis viral infection, which can be achieved using immunomodulators.

[0197] Exemplary immunomodulatory therapies include pegylated Interferon alfa-2b (Intron A), PD-1, PD-L1 or other immune checkpoint inhibitors, Toll-like receptor (TLR) agonists, recombinant interleukins, antibodies and agonists of pattern recognition receptors or other general or specific immunomodulatory agents.

[0198] In some embodiments, the immunomodulators are TLR agonists. TLR agonists have attracted interest for use as vaccine adjuvants or immune modulators because of their ability to induce the production of IFN, proinflammatory cytokines and chemokines, which exert anti-HBV effect. Exemplary TLR agonists include TLR 2 agonists, TLR4 agonists, TLR7 agonists (e.g., GS-9620 (vesatolimod), APR002 and AL-034), TLR8 agonists (e.g., ssRNA40 and GS-9688), and TLR9 agonists (e.g., CpG oligodeoxynucleotides (ODNs) and AIC649). Other agents that can stimulate the innate immune response may include STING agonists and RIG-I (retinoic acid-inducible protein) agonists.

[0199] In other embodiments, the siRNA described herein or the composition thereof is used optionally with additional antiviral agents in combination with immunomodulators that may activate the immune response in the host in a manner to improve the response to the viral infection. The immunomodulatory agents include but are not limited to therapeutic vaccines to stimulate the immune system (for example HerberNasvac, HepTCell, VBI-2601, GSK3528869A and the like), TLR agonists (such as TLR4, 7, 8 and 9 including but not limited to Selgantolimod/GS9688, RG7854, CB06, imiquimod, SBT8230 and the like), Monoclonal antibodies that neutralize HBV proteins and may or may not have FC domain signaling capabilities (such as lenvervimab, VIR-3434, BJT-778 and the like), check point inhibitors (for example (ASC22, GS4224, RG6084, Keytruda, anti-CTLA-4, anti-LAG3, anti-PD-1, anti-PDL1, anti-TIGIT, anti-ICOS and the like) as well as additional immune system adjuvants and modulatory agents including potentially cell therapies. While the above list is not meant to be limiting or exhaustive, one skilled in the art will realize there are extensive immunomodulatory mechanisms that could benefit from the siRNA therapy described herein to reduce viral load and replication. Combinations of multiple immunomodulatory agents may be employed potentially with combinations of additional antiviral therapies to result in a functional and/or sterilizing cure of viral hepatitis B and D.

[0200] In some embodiments, the siRNA molecules, compositions and methods as described herein may be used in combination with one or more therapeutic HBV or HDV vaccines. The individual patient's own immune response to HBV infection is important for spontaneous clearance of HBV infection requires a vigorous, polyclonal antigen-specific, adaptive immune response against HBV proteins. In some instances, after treatment with the siRNA molecule of the present disclosure, or a composition thereof after an acute viral infection, a therapeutic vaccine may be used to clear the viral proteins.

[0201] In yet another aspect, the present compound, compositions and methods as described herein may be used in combination with another therapy of MAFLD, MASH, or MetALD.

[0202] In some embodiments, two or more compositions are administered simultaneously, sequentially, or at an interval period of time. In some embodiments, one or more pharmaceutical compositions are administered simultaneously. In some cases, one or more pharmaceutical compositions are administered sequentially. In additional cases, one or more pharmaceutical compositions are administered at an interval period of time (e.g., the first administration of a first pharmaceutical composition is on day one followed by an interval of at least 1, 2, 3, 4, 5, or more days prior to the administration of at least a second pharmaceutical composition.

### Kits and Packages

[0203] In another aspect, the present disclosure provides kits and commercial packages comprising one or more siRNA molecules for repressing the expression of a SLC10A1 mRNA transcript, and optionally one or more agents that supplement use of the siRNA molecules in the kits and packages, such as buffers.

[0204] In some embodiments, the kit may also contain positive and negative control siRNAs (e.g., a non-targeting control siRNA or a siRNA that targets an unrelated mRNA). The kit also may contain reagents for assessing knockdown of the intended target gene SLC10A1 (e.g., primers and probes for quantitative PCR to detect the target mRNA and/or antibodies against the corresponding protein for western blots).

[0205] In some embodiments, the kit may comprise a siRNA sequence information and the instructions and materials necessary to generate the siRNA.

[0206] In some embodiments, a pharmaceutical combination in kit form may be provided that includes, in packaged combination, a carrier means adapted to receive a container means in close confinement therewith and a first container means including an interfering RNA composition and an acceptable carrier. Such kits can further include, if desired, one or more of various conventional pharmaceutical kit components, such as, for example, containers with one or more pharmaceutically acceptable carriers, additional containers, etc., as will be readily apparent to those skilled in the art. Printed instructions, either as inserts or as labels, indicating quantities of the components to be administered, guidelines for administration, and/or guidelines for mixing the components, can also be included in the kit.

### EXAMPLES

### Example 1: Identification of siRNAs Targeting Human SLC10A1 mRNA

[0207] Candidate sense and antisense strands of siRNAs including all possible siRNAs were designed for human SLC10A1 mRNA transcript (NM_003049.4; SEQ ID NO. 1093). The sequences were calculated and selected using selection criteria including frequency of off-targets, homology with miRNA seed sequences and cross reactivity with SLC10A1 mRNAs from other species, etc. The sense strand and antisense strand sequences were calculated separately for the selection criteria. siRNA off-target genes were predicted for human, rhesus monkey, cynomolgus monkey, mouse and rat SLC10A1 mRNA transcripts. siRNA strands were analyzed for presence of any of miRNA seed regions in human, rhesus monkey, dog, pig, mouse, rat and rabbit miRNAs. The cross-reactivity of each siRNA candidate was calculated for transcript variants and difference species. The top candidate sequences were selected and mapped to human SLC10A1 mRNA transcript after the calculations. Upon completion of the bioinformatic selection described herein, preferred siRNA-GalNAc conjugated candidate sequences were synthesized for further evaluation.

### Example 2: Silencing SLC10A1 Expression Using siRNAs

[0208] Each GalNAc conjugated siRNA molecule was evaluated in primary human hepatocytes at 0.3 μM or 1 μM with 3 biological replicates. To do this, primary human hepatocytes were isolated from a normal human liver, cryopreserved, and stored in liquid nitrogen until ready for experimental plating. Primary hepatocytes were thawed and plated in a collagen gel layer at 220,000 cells/cm² and treated with GalNAc-conjugated siRNAs prior to attachment hepatocyte attachment. The presence of the GalNAc moiety facilitates uptake in primary human hepatocytes without transfection reagents. After plating, cells were maintained in a humidified incubator at 37° C. and 5% CO₂ for the remainder of the experiment. The cultures were left overnight in maintenance medium that consisted of DMEM/F-12 supplemented with 10% fetal bovine serum, 50 mg/ml gentamycin, 0.2% ITS (Fisher/MediaTech MT-25c800CR), and dexamethasone (Sigma Aldrich D4902; 1 mM at plating and 250 nM thereafter). The following day, the media was exchanged for fresh maintenance media without GalNAc siRNAs. 72 hours after initial treatment with the GalNAc siRNAs, hepatocytes' RNA was collected in trizol using manufacturer protocols.

[0209] RNA was isolated using the Invitrogen Purelink RNA Mini kit (Cat. No. 12183018A) according to manufacturer's instructions. Measurement of SLC10A1 mRNA levels utilized a real-time reverse transcriptase polymerase chain reaction (RT-PCR) in duplicate. RNA was multiplexed with probes specific for human SLC10A1 and a human RPS11 using a BioRad CFX96 PCR Machine. For determining the percent gene knockdown by the GalNAc siRNAs, cycle times for SLC10A1 were normalized per well to RPS11 (a control, house-keeping gene) and then presented as percent inhibition relative to the negative, non-targeting control. Table 7 shows the percent knockdown of 146 selected siRNAs in primary hepatocytes.

TABLE 7
knockdown of expression of SLC10A1 mRNA by siRNA duplexes

| | Percent | | Percent | |
|---|---|---|---|---|
| | knockdown | Adj. | knockdown | Adj. |
| Duplex | (0.3 μM) | p-value | (1.0 μM) | p-value |
| ID | (%) | (0.3 μM) | (%) | (1 μM) |
| SR002 | −4% | 1.000 | −14% | 1.000 |
| SR003 | −5% | 1.000 | 14% | 1.000 |
| SR005 | 4% | 1.000 | −7% | 1.000 |
| SR013 | 17% | 1.000 | 26% | 1.000 |
| SR016 | 3% | 1.000 | −10% | 1.000 |
| SR018 | −3% | 1.000 | 9% | 1.000 |
| SR019 | 55% | <0.001 | 46% | <0.001 |
| SR024 | 31% | 0.002 | 30% | 1.000 |
| SR025 | −13% | 1.000 | −25% | 1.000 |
| SR026 | −1% | 1.000 | −9% | 1.000 |
| SR028 | 67% | <0.001 | 73% | <0.001 |
| SR030 | 40% | <0.001 | 44% | 0.084 |
| SR033 | −16% | 1.000 | −13% | 1.000 |
| SR034 | 3% | 1.000 | −29% | 1.000 |
| SR035 | 0% | 1.000 | 23% | 1.000 |
| SR036 | −16% | 1.000 | −37% | 0.901 |
| SR037 | 26% | 0.037 | 31% | 1.000 |
| SR043 | 22% | 0.315 | 18% | 1.000 |
| SR045 | 14% | 1.000 | 13% | 1.000 |
| SR046 | 7% | 1.000 | −13% | 1.000 |
| SR047 | 61% | <0.001 | 73% | <0.001 |
| SR048 | −2% | 1.000 | −9% | 1.000 |
| SR049 | −16% | 1.000 | −35% | 1.000 |
| SR050 | 28% | 0.010 | 32% | 0.141 |
| SR051 | −14% | 1.000 | −15% | 1.000 |
| SR057 | −7% | 1.000 | −13% | 1.000 |
| SR059 | 51% | <0.001 | 51% | 0.004 |
| SR062 | 27% | 0.019 | 34% | 0.057 |
| SR064 | −9% | 1.000 | 2% | 1.000 |
| SR067 | 4% | 1.000 | −12% | 1.000 |
| SR068 | 47% | <0.001 | 44% | 0.089 |
| SR070 | 0% | 1.000 | −11% | 1.000 |
| SR074 | −24% | 0.970 | −18% | 1.000 |
| SR075 | 23% | 0.253 | 9% | 1.000 |
| SR076 | 47% | <0.001 | 43% | <0.001 |
| SR077 | 15% | 1.000 | −2% | 1.000 |
| SR079 | 31% | 0.002 | 28% | 1.000 |
| SR082 | 52% | <0.001 | 61% | <0.001 |
| SR084 | 5% | 1.000 | 16% | 1.000 |
| SR085 | −20% | 1.000 | −16% | 1.000 |
| SR086 | −6% | 1.000 | 8% | 1.000 |
| SR087 | −13% | 1.000 | −15% | 1.000 |
| SR088 | −32% | 0.118 | −21% | 1.000 |
| SR089 | −2% | 1.000 | −16% | 1.000 |
| SR090 | 63% | <0.001 | 57% | <0.001 |
| SR093 | −1% | 1.000 | 20% | 1.000 |
| SR099 | 5% | 1.000 | −19% | 1.000 |
| SR100 | 6% | 1.000 | −24% | 1.000 |
| SR101 | −10% | 1.000 | 12% | 1.000 |
| SR102 | 15% | 1.000 | 26% | 1.000 |
| SR104 | 47% | <0.001 | 48% | 0.016 |
| SR105 | 9% | 1.000 | −3% | 1.000 |
| SR108 | 18% | 1.000 | −2% | 1.000 |
| SR115 | 26% | 0.047 | 38% | 0.013 |
| SR118 | −19% | 1.000 | 3% | 1.000 |
| SR119 | −1% | 1.000 | −3% | 1.000 |
| SR123 | 6% | 1.000 | 15% | 1.000 |
| SR126 | 14% | 1.000 | 8% | 1.000 |
| SR127 | −6% | 1.000 | 9% | 1.000 |
| SR128 | 12% | 1.000 | 5% | 1.000 |
| SR132 | −22% | 1.000 | −11% | 1.000 |
| SR135 | 12% | 1.000 | 6% | 1.000 |
| SR143 | −1% | 1.000 | −4% | 1.000 |
| SR146 | 14% | 1.000 | 68% | <0.001 |
| SR147 | 5% | 1.000 | 32% | 0.178 |
| SR151 | −44% | 0.002 | −27% | 1.000 |
| SR153 | −27% | 0.450 | −32% | 1.000 |
| SR156 | −10% | 1.000 | −5% | 1.000 |
| SR158 | 69% | <0.001 | 74% | <0.001 |
| SR159 | 58% | <0.001 | 48% | 0.017 |
| SR161 | −28% | 0.356 | −47% | 0.169 |
| SR162 | 24% | 0.144 | 23% | 1.000 |
| SR167 | 84% | <0.001 | 82% | <0.001 |
| SR169 | −34% | 0.062 | −8% | 1.000 |
| SR170 | −38% | 0.018 | −27% | 1.000 |
| SR171 | −32% | 0.109 | −52% | 0.069 |
| SR172 | −12% | 1.000 | −13% | 1.000 |
| SR174 | 31% | 0.002 | 55% | <0.001 |
| SR175 | 0% | 1.000 | −3% | 1.000 |
| SR177 | 25% | 0.090 | 26% | 1.000 |
| SR181 | 16% | 1.000 | 16% | 1.000 |
| SR182 | −13% | 1.000 | −8% | 1.000 |
| SR183 | −1% | 1.000 | −8% | 1.000 |
| SR185 | 14% | 1.000 | 7% | 1.000 |
| SR186 | −21% | 1.000 | −3% | 1.000 |
| SR188 | 24% | 0.103 | 33% | 1.000 |
| SR190 | −37% | 0.028 | −39% | 0.621 |
| SR191 | 8% | 1.000 | 13% | 1.000 |
| SR192 | 24% | 0.482 | 33% | 0.362 |
| SR193 | −28% | 0.338 | −40% | 1.000 |
| SR195 | 58% | <0.001 | 67% | <0.001 |
| SR197 | 49% | <0.001 | 59% | <0.001 |
| SR198 | −15% | 1.000 | −32% | 1.000 |
| SR199 | 18% | 1.000 | 31% | 0.262 |
| SR202 | −15% | 1.000 | −33% | 1.000 |
| SR206 | −1% | 1.000 | 5% | 1.000 |
| SR211 | −27% | 0.477 | −9% | 1.000 |
| SR215 | 47% | <0.001 | 47% | <0.001 |
| SR223 | 35% | <0.001 | 32% | 1.000 |
| SR224 | −19% | 1.000 | −4% | 1.000 |
| SR225 | 1% | 1.000 | −5% | 1.000 |
| SR229 | −14% | 1.000 | −25% | 1.000 |
| SR231 | 24% | 0.109 | 58% | <0.001 |
| SR234 | 39% | <0.001 | 30% | 0.901 |
| SR235 | 47% | <0.001 | 40% | 0.299 |
| SR237 | 54% | <0.001 | 56% | <0.001 |
| SR240 | 54% | <0.001 | 70% | <0.001 |
| SR242 | 18% | 1.000 | 17% | 1.000 |
| SR246 | −27% | 0.477 | −12% | 1.000 |
| SR249 | −34% | 0.061 | −4% | 1.000 |
| SR250 | 25% | 0.059 | 38% | 0.470 |
| SR251 | −35% | 0.049 | −49% | 0.152 |
| SR252 | −28% | 0.299 | −22% | 1.000 |
| SR254 | −32% | 0.118 | −14% | 1.000 |
| SR259 | 54% | <0.001 | 56% | <0.001 |
| SR261 | 1% | 1.000 | −16% | 1.000 |
| SR267 | 10% | 1.000 | 11% | 1.000 |
| SR271 | 85% | <0.001 | 90% | <0.001 |
| SR272 | 6% | 1.000 | 7% | 1.000 |
| SR276 | −2% | 1.000 | 7% | 1.000 |
| SR279 | 24% | 0.118 | 14% | 1.000 |
| SR280 | 19% | 1.000 | 32% | 0.166 |
| SR281 | 5% | 1.000 | 12% | 1.000 |
| SR282 | −28% | 0.356 | −38% | 0.787 |
| SR285 | 57% | <0.001 | 48% | 0.013 |
| SR287 | −10% | 1.000 | −34% | 1.000 |
| SR289 | 13% | 1.000 | 14% | 1.000 |
| SR290 | −16% | 1.000 | 8% | 1.000 |
| SR293 | −7% | 1.000 | −7% | 1.000 |
| SR297 | 42% | <0.001 | 49% | 0.012 |
| SR298 | 3% | 1.000 | 15% | 1.000 |
| SR299 | −43% | 0.003 | −31% | 1.000 |
| SR301 | −6% | 1.000 | −9% | 1.000 |
| SR308 | −39% | 0.011 | −23% | 1.000 |
| SR313 | −32% | 0.118 | −26% | 1.000 |
| SR317 | 16% | 1.000 | 3% | 1.000 |
| SR318 | −5% | 1.000 | −16% | 1.000 |
| SR324 | −15% | 1.000 | −10% | 1.000 |
| SR329 | 46% | <0.001 | 55% | <0.001 |
| SR331 | 30% | 0.037 | 40% | 0.028 |
| SR332 | 61% | <0.001 | 74% | <0.001 |
| SR339 | 32% | <0.001 | 45% | 0.061 |
| SR341 | 21% | 0.482 | 15% | 1.000 |
| SR342 | 21% | 0.480 | 16% | 1.000 |
| SR343 | −22% | 1.000 | −27% | 1.000 |
| SR344 | 8% | 1.000 | 20% | 1.000 |

[0210] The GalNAc siRNAs that were able to provide the best percent knockdown of SLC10A1 were further evaluated in dose response curves 1 μM to 16.9 pM following the same procedure above. Table 8 shows the dose response curves of the 15 siRNAs out of the 146 candidates.

TABLE 8
IC₅₀ of siRNA duplexes

| | Max % Inhibition | | IC₅₀ |
|---|---|---|---|
| Duplex ID | Average | SD | (nM) |
| SR019 | 64.1 | 7.6 | 12.1 |
| SR028 | 74.3 | 5.0 | 21.6 |
| SR047 | 74.2 | 4.5 | 28.0 |
| SR082 | 73.4 | 2.1 | 26.0 |
| SR158 | 87.2 | 3.7 | 9.0 |
| SR159 | 61.5 | 1.2 | 22.3 |
| SR167 | 89.4 | 3.6 | 3.7 |
| SR195 | 77.7 | 1.0 | 8.2 |
| SR197 | 70.9 | 8.9 | 12.1 |
| SR237 | 79.4 | 4.7 | 13.0 |
| SR240 | 63.5 | 2.9 | 39.3 |
| SR259 | 78 | 3.7 | 16.6 |
| SR271 | 81.5 | 4.0 | 2.4 |
| SR297 | 59.8 | 4.3 | 4.8 |
| SR332 | 75.1 | 1.8 | 16.1 |

### Example 3: Modification of siRNAs

[0211] For the GalNAc siRNAs described in Table 8 that provided the best percent knockdowns and most potent IC₅₀s, an additional 13 siRNAs with varied backbone modifications were synthesized for each sequence based on known literature modifications found to improve siRNA stability, off-target safety, and uptake. The modified sense and antisense strands of siRNA molecules are shown in Tables 3 and 5. These additional GalNAc siRNAs were evaluated in vitro in uptake assays in primary human hepatocytes (Donor L) to determine the percent knockdown of SLC10A1 at two concentrations (5 and 50 nM, Table 9) or IC₅₀ values (Table 10), as described above.

TABLE 9
knockdown of SLC10A1 mRNA expression by backbone modified
(SAR) siRNA duplexes at two concentrations

| | Percent (%) Knockdown of | | | Percent (%) Knockdown of | |
|---|---|---|---|---|---|
| | SLC10A1 mRNA per siRNA | | | SLC10A1 mRNA per siRNA | |
| | concentration | | | concentration | |
| Duplex ID | 5 nM | Duplex ID | Duplex ID | 5 nM | 50 nM |
| SR001 | 8.45 | 63.9 | SR195 | 32.7 | 68.7 |
| SR004 | 52.2 | 70.8 | SR196 | 49.9 | 67.5 |
| SR007 | −94.7 | 49.5 | SR197 | 38.8 | 63.5 |
| SR008 | 47.1 | 68 | SR200 | 37.9 | 60.9 |
| SR011 | 28.5 | 51.3 | SR201 | 29.1 | 21.7 |
| SR012 | 20.8 | 62.6 | SR203 | 14 | 57.4 |
| SR014 | 53.3 | 69.7 | SR205 | 41.5 | 67.3 |
| SR017 | 24.9 | 50.6 | SR207 | 46.7 | 73.5 |
| SR019 | 43.1 | 65.9 | SR208 | 32.8 | 60.4 |
| SR020 | 32.9 | 49 | SR209 | 36.7 | 60.9 |
| SR021 | 23 | 52.5 | SR210 | 28.7 | 60.4 |
| SR022 | 44.9 | 75 | SR213 | 53.5 | 68.3 |
| SR027 | 24.6 | 45.3 | SR214 | −19.8 | 50 |
| SR028 | 5.47 | 24.7 | SR216 | 33.6 | 57.4 |
| SR029 | 22.9 | 47.1 | SR217 | 39.2 | 59.1 |
| SR031 | 46.7 | 65.8 | SR218 | −86.4 | 46.8 |
| SR032 | 47.8 | 61.2 | SR219 | −50.1 | 58.2 |
| SR038 | 38.5 | 72 | SR220 | 40 | 49.9 |
| SR039 | 39.4 | 56.7 | SR221 | 45 | 65.4 |
| SR040 | −9.48 | 23.7 | SR226 | 46.1 | 57.7 |
| SR041 | 57 | 77.6 | SR227 | 26.3 | 56.4 |
| SR042 | 17.6 | 57.1 | SR228 | 46.6 | 69.9 |
| SR044 | 48.6 | 74 | SR230 | 19.2 | 44.2 |
| SR047 | 3.83 | 37.2 | SR233 | 36.6 | 63.9 |
| SR053 | 29.3 | 48.2 | SR237 | 41.9 | 76.2 |
| SR054 | 3.12 | 48.1 | SR238 | 43.4 | 70.1 |
| SR058 | 13.2 | 57 | SR239 | 13.7 | 52.5 |
| SR061 | 34.7 | 57.8 | SR240 | −5.83 | 2.29 |
| SR063 | 48.1 | 58.9 | SR243 | 35 | 62.1 |
| SR065 | 28.7 | 67.3 | SR245 | 47.1 | 64.8 |
| SR066 | 37.6 | 64.1 | SR247 | 40.4 | 61.3 |
| SR071 | 58 | 77.6 | SR248 | 40.7 | 66.6 |
| SR073 | 44 | 69.1 | SR253 | 48.4 | 71.2 |
| SR078 | 38.9 | 53.7 | SR255 | 59.7 | 63.3 |
| SR080 | 50.7 | 69.9 | SR256 | 40.2 | 68.6 |
| SR081 | 42.4 | 67.3 | SR257 | 30.6 | 67.3 |
| SR082 | 10.5 | 54.5 | SR258 | −27 | 23.9 |
| SR083 | 46.5 | 63.6 | SR259 | 37.1 | 59.7 |
| SR091 | 38.9 | 71.1 | SR260 | 29.7 | 61 |
| SR092 | 33.7 | 55.9 | SR262 | −157 | 16.8 |
| SR094 | 27.9 | 61.3 | SR263 | 7.78 | 33.9 |
| SR095 | 35.6 | 61.2 | SR265 | 52.9 | 81.2 |
| SR096 | 35.1 | 55.4 | SR266 | 37.4 | 62.5 |
| SR097 | 32 | 52.1 | SR269 | 15.4 | 57.5 |
| SR098 | 55.8 | 72.2 | SR270 | 51.9 | 69.9 |
| SR106 | 25.8 | 54.1 | SR273 | 39.6 | 59.1 |
| SR107 | 13.5 | 36.3 | SR277 | −1.8 | 54.9 |
| SR109 | 22.2 | 51.4 | SR278 | 51.3 | 67.9 |
| SR110 | 42 | 70.7 | SR283 | 55.3 | 70.3 |
| SR112 | −43.2 | 50.5 | SR284 | 39.9 | 64.2 |
| SR113 | −4.97 | 66.5 | SR286 | 30.8 | 62.4 |
| SR114 | 39.2 | 28.1 | SR291 | 45.1 | 66.1 |
| SR116 | 36.2 | 67.6 | SR292 | 19.4 | 63.2 |
| SR117 | 53.3 | 73.6 | SR294 | 45.1 | 71.4 |
| SR120 | 38.7 | 57.9 | SR295 | 11.2 | 60.5 |
| SR121 | 31.6 | 52.2 | SR296 | 23.9 | 58.2 |
| SR124 | 36.6 | 57.2 | SR297 | 1.65 | 40.5 |
| SR125 | 35.6 | 58.4 | SR300 | 26.8 | 64.4 |
| SR129 | 53.8 | 72.7 | SR304 | 23.9 | 65.2 |
| SR133 | 19.5 | 67.3 | SR305 | 45 | 66.3 |
| SR136 | 35.9 | 57 | SR306 | −64 | 68.2 |
| SR137 | 31 | 45.1 | SR307 | 43.7 | 67.2 |
| SR138 | 24.2 | 63.2 | SR309 | 24.7 | 49.9 |
| SR139 | 32 | 69.7 | SR310 | 48.1 | 59.7 |
| SR141 | −7.6 | 59.3 | SR311 | 35.9 | 58.1 |
| SR144 | 35.2 | 63.8 | SR312 | 33.2 | 54.6 |
| SR148 | 4.76 | 50.9 | SR314 | 36.1 | 54 |
| SR150 | 29.2 | 72.6 | SR315 | 17.5 | −1.91 |
| SR152 | 41 | 56.3 | SR316 | 2.29 | 54.3 |
| SR154 | 40.9 | 54.9 | SR319 | 59.7 | 74.3 |
| SR157 | 31.1 | 57.7 | SR321 | 29.2 | 63.9 |
| SR159 | −8.07 | 44.7 | SR322 | 17.9 | 32 |
| SR160 | 53.2 | 71 | SR323 | 30.4 | 71 |
| SR163 | 48.8 | 67.2 | SR325 | 49.4 | 69 |
| SR164 | 46.3 | 62.7 | SR326 | 41.6 | 65.9 |
| SR165 | 42.9 | 65.8 | SR327 | 36.8 | 60.4 |
| SR166 | 40.5 | 58.1 | SR330 | 20.1 | 50.8 |
| SR168 | 44 | 66.7 | SR332 | 6.38 | 41.9 |
| SR173 | 37.3 | 58.1 | SR333 | 50.6 | 74.2 |
| SR176 | 32.1 | 58 | SR335 | 13.7 | 45.5 |
| SR179 | 40.5 | 67.7 | SR337 | 55.3 | 70.2 |
| SR180 | 41.3 | 67.8 | SR338 | 60.3 | 74 |
| SR184 | 48.1 | 69.3 | SR340 | −29.7 | 57.7 |
| SR194 | −27.9 | 49.9 | SR345 | 44.6 | 65.3 |

TABLE 10
Dose response knockdown of SLC10A1 mRNA expression
by backbone modified siRNA duplexes

| | | Maximum |
|---|---|---|
| | | measured gene |
| Duplex ID | IC₅₀ (nM) | knockdown (%) |
| SR006 | 2.9 | 86.0 |
| SR009 | 2.3 | 77.8 |
| SR010 | 2.9 | 85.5 |
| SR015 | 3.2 | 88.8 |
| SR052 | 0.5 | 87.8 |
| SR056 | 5.7 | 86.5 |
| SR060 | 1.4 | 94.4 |
| SR072 | 3.2 | 89.3 |
| SR103 | 1.7 | 92.0 |
| SR111 | 1.6 | 91.1 |
| SR122 | 2.0 | 94.5 |
| SR130 | 4.9 | 88.4 |
| SR131 | 1.7 | 93.9 |
| SR134 | 3.0 | 89.0 |
| SR140 | 4.2 | 88.5 |
| SR142 | 2.0 | 91.1 |
| SR145 | 2.2 | 87.9 |
| SR149 | 2.1 | 86.0 |
| SR155 | 3.6 | 91.8 |
| SR158 | 3.4 | 86.8 |
| SR167 | 2.7 | 90.2 |
| SR178 | 2.3 | 80.7 |
| SR187 | 1.7 | 88.3 |
| SR189 | 2.1 | 86.1 |
| SR204 | 2.0 | 89.0 |
| SR212 | 2.6 | 89.7 |
| SR222 | 2.7 | 90.5 |
| SR232 | 5.0 | 86.5 |
| SR241 | 3.6 | 87.5 |
| SR244 | 2.5 | 75.0 |
| SR264 | 2.1 | 90.6 |
| SR268 | 3.1 | 84.7 |
| SR271 | 1.5 | 87.2 |
| SR274 | 1.4 | 89.0 |
| SR275 | 3.8 | 89.7 |
| SR288 | 2.1 | 94.4 |
| SR303 | 3.1 | 89.2 |
| SR320 | 1.6 | 93.4 |
| SR328 | 5.0 | 88.1 |
| SR334 | 3.2 | 90.1 |
| SR336 | 3.2 | 84.9 |
| SR399 | 2.2 | 94.1 |
| SR456 | 4.2 | 91.0 |
| SR532 | 5.6 | 88.4 |
| SR540 | 5.6 | 88.8 |
| SR646 | 2.8 | 95.8 |
| SR676 | 10.9 | 84.0 |
| SR698 | 2.0 | 93.4 |
| SR702 | 2.5 | 94.4 |

### Example 4: Bile Acid Uptake Inhibition In Vitro

[0212] Primary human hepatocytes were treated with siRNA during plating and utilized ASGPR-mediated uptake into the cells. Seventy-two hours post treatment, cells were evaluated for bile acid uptake. Briefly, 50 μM Taurocholic acid (TCA) were added to the cells. Cells were treated for 30 minutes at 37° ° C. in a humidified incubator. TCA was then aspirated, and cells were washed four times with ice cold Dulbecco's phosphate buffered saline (PBS) containing calcium and magnesium. After the fourth wash, cells were lysed in 70% acetonitrile and frozen at −80° C. Samples were processed and TCA concentrations were quantified using RapidFire mass spectrometry. Table 11 shows the average bile acid transport inhibition in two primary human hepatocyte donors.

TABLE 11
Average bile acid transport inhibition
in primary human hepatocytes

| | IC₅₀ (nM) | IC₅₀ (nM) |
|---|---|---|
| Duplex ID | Donor I | Donor M |
| SR060 | 1.05 | — |
| SR103 | 0.55 | 4.95 |
| SR122 | 0.83 | 7.73 |
| SR131 | 0.83 | — |
| SR264 | 0.59 | — |
| SR320 | 1.05 | 6.77 |

### Example 5: Pharmacology of siRNAs in Non-Human Primate (NHP) Studies

[0213] siRNAs described herein can have long-acting in vivo pharmacology when studied in non-human primates (NHPs).

[0214] An exemplary siRNA, duplex ID SR122, was administered as a single dose at either 3 mg/kg (3 mpk) or 10 mg/kg (10 mpk) to cynomolgus monkeys.

[0215] FIG. 1A illustrates that, as an average of three animals receiving SR122, SR122 shows excellent and durable evidence of target engagement for both doses, including as studied for 120 days for the 10 mpk dose. An alternative mechanism of inhibition of sodium taurocholate cotransporting polypeptide (NTCPi) by a small molecule (“SMOL”) is provided for comparison.

[0216] FIG. 1B illustrates that, as an average of three animals receiving SR122 and three control animals, liver biopsy data demonstrated robust gene knockdown at both 3 and 10 mg/kg doses, including at Day 150 for the latter dose.

[0217] FIG. 1C illustrates that liver function tests (LFTs) over the course of the 10 mg/kg study remain unchanged from baseline values for ALT, ALP, AST, and TBIL, which are supportive of target and drug candidate safety.

### Example 6: In Vivo Knockdown of mNTCP

[0218] Duplex ID SR319 has been identified as a mouse NTCP-targeting surrogate siRNA for in vivo studies.

[0219] As illustrated in FIG. 2, an in vivo proof of principle target engagement study for gene knockdown has shown robust (>90%), durable, and dose responsive mRNA knockdown in mice by SR319.

[0220] SR319 was also well tolerated by all animals (n=16) through study completion at day 45.

[0221] A 10 mg/kg dose of SR319 over 14 days (SC injection at day −7, BDL at day 0, sacrifice at Day 7) was selected for the bile duct ligation model of Example 6.

### Example 7: Bile-Duct Ligation (BDL) Cholestasis Model

[0222] The bile-duct ligation (BDL) mouse model is well characterized, widely used and recapitulates fundamental aspects of human cholestatic liver injury allowing evaluation of acute hepatoprotective effects. This model has been used to characterize the effects of bulevirtide (an inhibitor of NTCP) and UDCA. These studies can be used to demonstrate that reducing bile acid uptake by NTCP inhibition (SMOL) or knock down (siRNA) will ameliorate the hepatocyte injury and secondary inflammatory, fibrotic response induced in an acute obstructive cholestasis model, including by showing: reduction of liver injury markers; and reduction of inflammatory, fibrotic, proliferative, and FXR responses.

[0223] A 7-day BDL mouse model was chosen to assess both hepatoprotective effects of an exemplary siRNA and an exemplary small molecule in the acute phase as well as effects on inflammation and fibrosis that start occurring after day 5. The study design is illustrated in FIG. 3.

[0224] Prophylactic treatment was initiated at day −7 for the single 10 mg/kg dose of an exemplary siRNA (duplex ID=SR319) to allow for 7 days of Slc10a1 knockdown prior to the bile duct ligation procedure and at day −2 for an exemplary small molecule (“SMOL”) inhibitor of NTCP. SMOL was dosed BID at 30 mg/kg/dose for 9 days.

[0225] Bile duct ligation was performed at day 0, and animals were sacrificed at day 7. Serum was collected at day 3 and 7.

[0226] Endpoints for this study included:
[0227] Liver injury markers (ALP, ALT, T-bilirubin); and
[0228] Inflammatory, fibrotic, proliferative and FXR response markers (gene expression) (Tnfa, Mcp-1, TGFb, Col1a1, Foxmb1, Krt7, Shp-1, Mdr2, Ostb).

[0229] As shown herein, treatment according to the present example has demonstrated the efficacy of certain exemplary treatments, including showing that reducing bile acid uptake by NTCP inhibition using an exemplary small molecule (SMOL) or knock down using an exemplary siRNA (duplex ID=SR319) ameliorated the hepatocyte injury and secondary inflammatory, fibrotic effects in the BDL acute, complete obstructive cholestasis model. In particular, the present example illustrates: reduction of ALP and ALT; reduction of inflammatory and fibrotic gene response; reduction of proliferative gene response; and reduction in FXR signaling.

### Target Engagement

[0230] Knockdown or inhibition of NTCP will prevent uptake of bile acids by the hepatocyte and as a result, bile acids in the serum will be increased. As illustrated in FIG. 4, inhibition of NTCP with an exemplary small molecule (SMOL) and knockdown with siRNA (SR319) results in an increase in taurocholic acid (TCA) in the serum on day 7, indicative of target engagement. Response was comparable to data reported for bulevirtide (Slijepcevic et al., Hepatology, 2018, 68, 1057-1069).

### Liver Injury Markers

[0231] Rapidly after BDL, mice develop obstructive jaundice and cholestasis due to bile acid-induced hepatotoxicity, marked by elevated alkaline phosphatase (ALP), serum transaminase activity (ALT) and bilirubin levels. As illustrated in FIG. 5, inhibition of NTCP with an exemplary small molecule (SMOL) and siRNA (SR319) results in a clear reduction of ALP and ALT at both day 3 and day 7, indicative of a hepatoprotective function. Response was comparable to data reported for bulevirtide (Slijepcevic et al., Hepatology, 2018, 68, 1057-1069). As bilirubin is transported by OATP and thus, T-bil levels are not affected.

### Inflammation, Fibrosis, and Proliferation

[0232] Acute hepatocyte injury in BDL is followed by infiltration of immune cells, hepatocyte and cholangiocyte proliferation and activation of stellate cells and initiation of a fibrotic response. FIG. 6 illustrates that inhibiting NTCP with an exemplary siRNA (duplex ID=SR319) or an exemplary small molecule (SMOL) reduces inflammatory (TNFa and MCP-1), fibrotic (TGF-b and Col1a1), and proliferative (Foxm1b and Krt7) markers. Reduction of inflammatory and proliferative markers gene expression was observed, consistent with an ameliorated hepatocyte injury, and reduction of inflammatory and proliferative markers gene expression was observed, consistent with an ameliorated hepatocyte injury. These data are consistent with previously published BLV-peptide results (Slijepcevic et al., Hepatology, 2018, 68, 1057-1069).

### FXR Signaling

[0233] The bile acid (BA) nuclear receptor, FXR, mediates the expression of genes involved in BA synthesis, metabolism and transport that can serve as surrogate markers of intracellular BA accumulation in hepatocytes. Inhibition of NTCP results in reduced levels of FXR target genes Shp-1, Mdr2 and Ostb, indicative of lower intracellular BA levels in hepatocytes. Reduced hepatocyte FXR signaling may have a secondary benefit of reducing pruritus in humans. FIG. 7 illustrates that an exemplary siRNA (duplex ID=SR319) and an exemplary small molecule (SMOL) each lower intracellular bile acids as evidenced by reduced FXR signaling.

### EQUIVALENTS AND SCOPE

[0234] Those skilled in the art would recognize, or be able to ascertain using no more than routine experimentation, many equivalents to the specific embodiments of the invention described herein. The scope of the invention is not intended to be limited to the above Description, but rather is as set forth in the following claims:

The application's sequence listing, which the Patent Office published only in electronic form, follows.

SEQUENCE LISTING (1093 sequences)

SEQ ID NO: 1 - RNA, 19 nt, synthetic construct
  source 1..19: mol_type = other RNA
agatcaaggctcacttatg

SEQ ID NO: 2 - RNA, 19 nt, synthetic construct
  source 1..19: mol_type = other RNA
tcagcattgtgatgaccac

SEQ ID NO: 3 - RNA, 19 nt, synthetic construct
  source 1..19: mol_type = other RNA
tcatcattctcttgtgcag

SEQ ID NO: 4 - RNA, 19 nt, synthetic construct
  source 1..19: mol_type = other RNA
tggccgtcacagttctctc

SEQ ID NO: 5 - RNA, 19 nt, synthetic construct
  source 1..19: mol_type = other RNA
tggtcccaaagcaattctg

SEQ ID NO: 6 - RNA, 19 nt, synthetic construct
  source 1..19: mol_type = other RNA
tccagtacatctatcagaa

SEQ ID NO: 7 - RNA, 19 nt, synthetic construct
  source 1..19: mol_type = other RNA
ccagtacatctatcagaat

SEQ ID NO: 8 - RNA, 19 nt, synthetic construct
  source 1..19: mol_type = other RNA
atctatcagaatcatcaag

SEQ ID NO: 9 - RNA, 19 nt, synthetic construct
  source 1..19: mol_type = other RNA
aagtcactcaattcctgaa

SEQ ID NO: 10 - RNA, 19 nt, synthetic construct
  source 1..19: mol_type = other RNA
cctgaactaatcaatatat

SEQ ID NO: 11 - RNA, 19 nt, synthetic construct
  source 1..19: mol_type = other RNA
tgaactaatcaatatatat

SEQ ID NO: 12 - RNA, 19 nt, synthetic construct
  source 1..19: mol_type = other RNA
tggttctcattccttgcac

SEQ ID NO: 13 - RNA, 19 nt, synthetic construct
  source 1..19: mol_type = other RNA
ctcattccttgcaccatag

SEQ ID NO: 14 - RNA, 19 nt, synthetic construct
  source 1..19: mol_type = other RNA
ttggctttctgctgggtta

SEQ ID NO: 15 - RNA, 19 nt, synthetic construct
  source 1..19: mol_type = other RNA
tcctctacatgattttcca

SEQ ID NO: 16 - RNA, 21 nt, synthetic construct
  source 1..21: mol_type = other RNA
cataagtgagccttgatcttg

SEQ ID NO: 17 - RNA, 21 nt, synthetic construct
  source 1..21: mol_type = other RNA
gtggtcatcacaatgctgagg

SEQ ID NO: 18 - RNA, 21 nt, synthetic construct
  source 1..21: mol_type = other RNA
ctgcacaagagaatgatgatc

SEQ ID NO: 19 - RNA, 21 nt, synthetic construct
  source 1..21: mol_type = other RNA
gagagaactgtgacggccaca

SEQ ID NO: 20 - RNA, 21 nt, synthetic construct
  source 1..21: mol_type = other RNA
cagaattgctttgggaccaga

SEQ ID NO: 21 - RNA, 21 nt, synthetic construct
  source 1..21: mol_type = other RNA
ttctgatagatgtactggaaa

SEQ ID NO: 22 - RNA, 21 nt, synthetic construct
  source 1..21: mol_type = other RNA
attctgatagatgtactggaa

SEQ ID NO: 23 - RNA, 21 nt, synthetic construct
  source 1..21: mol_type = other RNA
cttgatgattctgatagatgt

SEQ ID NO: 24 - RNA, 21 nt, synthetic construct
  source 1..21: mol_type = other RNA
ttcaggaattgagtgacttta

SEQ ID NO: 25 - RNA, 21 nt, synthetic construct
  source 1..21: mol_type = other RNA
atatattgattagttcaggaa

SEQ ID NO: 26 - RNA, 21 nt, synthetic construct
  source 1..21: mol_type = other RNA
atatatattgattagttcagg

SEQ ID NO: 27 - RNA, 21 nt, synthetic construct
  source 1..21: mol_type = other RNA
gtgcaaggaatgagaaccagg

SEQ ID NO: 28 - RNA, 21 nt, synthetic construct
  source 1..21: mol_type = other RNA
ctatggtgcaaggaatgagaa

SEQ ID NO: 29 - RNA, 21 nt, synthetic construct
  source 1..21: mol_type = other RNA
taacccagcagaaagccaata

SEQ ID NO: 30 - RNA, 21 nt, synthetic construct
  source 1..21: mol_type = other RNA
tggaaaatcatgtagaggagg

SEQ ID NO: 31 - RNA, 19 nt, synthetic construct
  source 1..19: mol_type = other RNA
agatcaaggctcacttata

SEQ ID NO: 32 - RNA, 19 nt, synthetic construct
  source 1..19: mol_type = other RNA
tcagcattgtgatgaccaa

SEQ ID NO: 33 - RNA, 19 nt, synthetic construct
  source 1..19: mol_type = other RNA
tcatcattctcttgtgcaa

SEQ ID NO: 34 - RNA, 19 nt, synthetic construct
  source 1..19: mol_type = other RNA
tggccgtcacagttctcta

SEQ ID NO: 35 - RNA, 19 nt, synthetic construct
  source 1..19: mol_type = other RNA
tggtcccaaagcaattcta

SEQ ID NO: 36 - RNA, 19 nt, synthetic construct
  source 1..19: mol_type = other RNA
tccagtacatctatcagaa

SEQ ID NO: 37 - RNA, 19 nt, synthetic construct
  source 1..19: mol_type = other RNA
ccagtacatctatcagaaa

SEQ ID NO: 38 - RNA, 19 nt, synthetic construct
  source 1..19: mol_type = other RNA
atctatcagaatcatcaaa

SEQ ID NO: 39 - RNA, 19 nt, synthetic construct
  source 1..19: mol_type = other RNA
aagtcactcaattcctgaa

SEQ ID NO: 40 - RNA, 19 nt, synthetic construct
  source 1..19: mol_type = other RNA
cctgaactaatcaatataa

SEQ ID NO: 41 - RNA, 19 nt, synthetic construct
  source 1..19: mol_type = other RNA
tgaactaatcaatatataa

SEQ ID NO: 42 - RNA, 19 nt, synthetic construct
  source 1..19: mol_type = other RNA
tggttctcattccttgcaa

SEQ ID NO: 43 - RNA, 19 nt, synthetic construct
  source 1..19: mol_type = other RNA
ctcattccttgcaccataa

SEQ ID NO: 44 - RNA, 19 nt, synthetic construct
  source 1..19: mol_type = other RNA
ttggctttctgctgggtta

SEQ ID NO: 45 - RNA, 19 nt, synthetic construct
  source 1..19: mol_type = other RNA
tcctctacatgattttcca

SEQ ID NO: 46 - RNA, 21 nt, synthetic construct
  source 1..21: mol_type = other RNA
tataagtgagccttgatcttg

SEQ ID NO: 47 - RNA, 21 nt, synthetic construct
  source 1..21: mol_type = other RNA
ttggtcatcacaatgctgagg

SEQ ID NO: 48 - RNA, 21 nt, synthetic construct
  source 1..21: mol_type = other RNA
ttgcacaagagaatgatgatc

SEQ ID NO: 49 - RNA, 21 nt, synthetic construct
  source 1..21: mol_type = other RNA
tagagaactgtgacggccaca

SEQ ID NO: 50 - RNA, 21 nt, synthetic construct
  source 1..21: mol_type = other RNA
tagaattgctttgggaccaga

SEQ ID NO: 51 - RNA, 21 nt, synthetic construct
  source 1..21: mol_type = other RNA
ttctgatagatgtactggaaa

SEQ ID NO: 52 - RNA, 21 nt, synthetic construct
  source 1..21: mol_type = other RNA
tttctgatagatgtactggaa

SEQ ID NO: 53 - RNA, 21 nt, synthetic construct
  source 1..21: mol_type = other RNA
tttgatgattctgatagatgt

SEQ ID NO: 54 - RNA, 21 nt, synthetic construct
  source 1..21: mol_type = other RNA
ttcaggaattgagtgacttta

SEQ ID NO: 55 - RNA, 21 nt, synthetic construct
  source 1..21: mol_type = other RNA
ttatattgattagttcaggaa

SEQ ID NO: 56 - RNA, 21 nt, synthetic construct
  source 1..21: mol_type = other RNA
ttatatattgattagttcagg

SEQ ID NO: 57 - RNA, 21 nt, synthetic construct
  source 1..21: mol_type = other RNA
ttgcaaggaatgagaaccagg

SEQ ID NO: 58 - RNA, 21 nt, synthetic construct
  source 1..21: mol_type = other RNA
ttatggtgcaaggaatgagaa

SEQ ID NO: 59 - RNA, 21 nt, synthetic construct
  source 1..21: mol_type = other RNA
taacccagcagaaagccaata

SEQ ID NO: 60 - RNA, 21 nt, synthetic construct
  source 1..21: mol_type = other RNA
tggaaaatcatgtagaggagg

SEQ ID NO: 61 - RNA, 19 nt, synthetic construct
  source 1..19: mol_type = other RNA
  modified_base 1: mod_base = OTHER; note = 2'-O-methyl modified nucleotide with phosphorothioate linkage
  modified_base 2: mod_base = OTHER; note = 2'-O-methyl modified nucleotide with phosphorothioate linkage
  modified_base 3: mod_base = OTHER; note = 2'-O-methyl modified nucleotide
  modified_base 4: mod_base = OTHER; note = 2'-O-methyl modified nucleotide
  modified_base 5: mod_base = OTHER; note = 2'-fluoro modified nucleotide
  modified_base 6: mod_base = OTHER; note = 2'-O-methyl modified nucleotide
  modified_base 7: mod_base = OTHER; note = 2'-fluoro modified nucleotide
  modified_base 8: mod_base = OTHER; note = 2'-fluoro modified nucleotide
  modified_base 9: mod_base = OTHER; note = 2'-fluoro modified nucleotide
  modified_base 10: mod_base = OTHER; note = 2'-O-methyl modified nucleotide
  modified_base 11: mod_base = OTHER; note = 2'-O-methyl modified nucleotide
  modified_base 12: mod_base = OTHER; note = 2'-O-methyl modified nucleotide
  modified_base 13: mod_base = OTHER; note = 2'-O-methyl modified nucleotide
  modified_base 14: mod_base = OTHER; note = 2'-O-methyl modified nucleotide
  modified_base 15: mod_base = OTHER; note = 2'-O-methyl modified nucleotide
  modified_base 16: mod_base = OTHER; note = 2'-O-methyl modified nucleotide
  modified_base 17: mod_base = OTHER; note = 2'-O-methyl modified nucleotide
  modified_base 18: mod_base = OTHER; note = 2'-O-methyl modified nucleotide
  modified_base 19: mod_base = OTHER; note = 2'-O-methyl modified nucleotide
agatcaaggctcacttata

SEQ ID NO: 62 - RNA, 19 nt, synthetic construct
  source 1..19: mol_type = other RNA
  modified_base 1: mod_base = OTHER; note = 2'-O-methyl modified nucleotide with phosphorothioate linkage
  modified_base 2: mod_base = OTHER; note = 2'-O-methyl modified nucleotide with phosphorothioate linkage
  modified_base 3: mod_base = OTHER; note = 2'-O-methyl modified nucleotide
  modified_base 4: mod_base = OTHER; note = 2'-O-methyl modified nucleotide
  modified_base 5: mod_base = OTHER; note = 2'-fluoro modified nucleotide
  modified_base 6: mod_base = OTHER; note = 2'-O-methyl modified nucleotide
  modified_base 7: mod_base = OTHER; note = 2'-fluoro modified nucleotide
  modified_base 8: mod_base = OTHER; note = 2'-fluoro modified nucleotide
  modified_base 9: mod_base = OTHER; note = 2'-fluoro modified nucleotide
  modified_base 10: mod_base = OTHER; note = 2'-O-methyl modified nucleotide
  modified_base 11: mod_base = OTHER; note = 2'-O-methyl modified nucleotide
  modified_base 12: mod_base = OTHER; note = 2'-O-methyl modified nucleotide
  modified_base 13: mod_base = OTHER; note = 2'-O-methyl modified nucleotide
  modified_base 14: mod_base = OTHER; note = 2'-O-methyl modified nucleotide
  modified_base 15: mod_base = OTHER; note = 2'-O-methyl modified nucleotide
  modified_base 16: mod_base = OTHER; note = 2'-O-methyl modified nucleotide
  modified_base 17: mod_base = OTHER; note = 2'-O-methyl modified nucleotide
  modified_base 18: mod_base = OTHER; note = 2'-O-methyl modified nucleotide
  modified_base 19: mod_base = OTHER; note = 2'-O-methyl modified nucleotide
tcagcattgtgatgaccaa

SEQ ID NO: 63 - RNA, 19 nt, synthetic construct
  source 1..19: mol_type = other RNA
  modified_base 1: mod_base = OTHER; note = 2'-O-methyl modified nucleotide with phosphorothioate linkage
  modified_base 2: mod_base = OTHER; note = 2'-O-methyl modified nucleotide with phosphorothioate linkage
  modified_base 3: mod_base = OTHER; note = 2'-O-methyl modified nucleotide
  modified_base 4: mod_base = OTHER; note = 2'-O-methyl modified nucleotide
  modified_base 5: mod_base = OTHER; note = 2'-fluoro modified nucleotide
  modified_base 6: mod_base = OTHER; note = 2'-O-methyl modified nucleotide
  modified_base 7: mod_base = OTHER; note = 2'-fluoro modified nucleotide
  modified_base 8: mod_base = OTHER; note = 2'-fluoro modified nucleotide
  modified_base 9: mod_base = OTHER; note = 2'-fluoro modified nucleotide
  modified_base 10: mod_base = OTHER; note = 2'-O-methyl modified nucleotide
  modified_base 11: mod_base = OTHER; note = 2'-O-methyl modified nucleotide
  modified_base 12: mod_base = OTHER; note = 2'-O-methyl modified nucleotide
  modified_base 13: mod_base = OTHER; note = 2'-O-methyl modified nucleotide
  modified_base 14: mod_base = OTHER; note = 2'-O-methyl modified nucleotide
  modified_base 15: mod_base = OTHER; note = 2'-O-methyl modified nucleotide
  modified_base 16: mod_base = OTHER; note = 2'-O-methyl modified nucleotide
  modified_base 17: mod_base = OTHER; note = 2'-O-methyl modified nucleotide
  modified_base 18: mod_base = OTHER; note = 2'-O-methyl modified nucleotide
  modified_base 19: mod_base = OTHER; note = 2'-O-methyl modified nucleotide
tcatcattctcttgtgcaa

SEQ ID NO: 64 - RNA, 19 nt, synthetic construct
  source 1..19: mol_type = other RNA
  modified_base 1: mod_base = OTHER; note = 2'-O-methyl modified nucleotide with phosphorothioate linkage
  modified_base 2: mod_base = OTHER; note = 2'-O-methyl modified nucleotide with phosphorothioate linkage
  modified_base 3: mod_base = OTHER; note = 2'-O-methyl modified nucleotide
  modified_base 4: mod_base = OTHER; note = 2'-O-methyl modified nucleotide
  modified_base 5: mod_base = OTHER; note = 2'-fluoro modified nucleotide
  modified_base 6: mod_base = OTHER; note = 2'-O-methyl modified nucleotide
  modified_base 7: mod_base = OTHER; note = 2'-fluoro modified nucleotide
  modified_base 8: mod_base = OTHER; note = 2'-fluoro modified nucleotide
  modified_base 9: mod_base = OTHER; note = 2'-fluoro modified nucleotide
  modified_base 10: mod_base = OTHER; note = 2'-O-methyl modified nucleotide
  modified_base 11: mod_base = OTHER; note = 2'-O-methyl modified nucleotide
  modified_base 12: mod_base = OTHER; note = 2'-O-methyl modified nucleotide
  modified_base 13: mod_base = OTHER; note = 2'-O-methyl modified nucleotide
  modified_base 14: mod_base = OTHER; note = 2'-O-methyl modified nucleotide
  modified_base 15: mod_base = OTHER; note = 2'-O-methyl modified nucleotide
  modified_base 16: mod_base = OTHER; note = 2'-O-methyl modified nucleotide
  modified_base 17: mod_base = OTHER; note = 2'-O-methyl modified nucleotide
  modified_base 18: mod_base = OTHER; note = 2'-O-methyl modified nucleotide
  modified_base 19: mod_base = OTHER; note = 2'-O-methyl modified nucleotide
tggccgtcacagttctcta

SEQ ID NO: 65 - RNA, 19 nt, synthetic construct
  source 1..19: mol_type = other RNA
  modified_base 1: mod_base = OTHER; note = 2'-O-methyl modified nucleotide with phosphorothioate linkage
  modified_base 2: mod_base = OTHER; note = 2'-O-methyl modified nucleotide with phosphorothioate linkage
  modified_base 3: mod_base = OTHER; note = 2'-O-methyl modified nucleotide
  modified_base 4: mod_base = OTHER; note = 2'-O-methyl modified nucleotide
  modified_base 5: mod_base = OTHER; note = 2'-fluoro modified nucleotide
  modified_base 6: mod_base = OTHER; note = 2'-O-methyl modified nucleotide
  modified_base 7: mod_base = OTHER; note = 2'-fluoro modified nucleotide
  modified_base 8: mod_base = OTHER; note = 2'-fluoro modified nucleotide
  modified_base 9: mod_base = OTHER; note = 2'-fluoro modified nucleotide
  modified_base 10: mod_base = OTHER; note = 2'-O-methyl modified nucleotide
  modified_base 11: mod_base = OTHER; note = 2'-O-methyl modified nucleotide
  modified_base 12: mod_base = OTHER; note = 2'-O-methyl modified nucleotide
  modified_base 13: mod_base = OTHER; note = 2'-O-methyl modified nucleotide
  modified_base 14: mod_base = OTHER; note = 2'-O-methyl modified nucleotide
  modified_base 15: mod_base = OTHER; note = 2'-O-methyl modified nucleotide
  modified_base 16: mod_base = OTHER; note = 2'-O-methyl modified nucleotide
  modified_base 17: mod_base = OTHER; note = 2'-O-methyl modified nucleotide
  modified_base 18: mod_base = OTHER; note = 2'-O-methyl modified nucleotide
  modified_base 19: mod_base = OTHER; note = 2'-O-methyl modified nucleotide
tggtcccaaagcaattcta

SEQ ID NO: 66 - RNA, 19 nt, synthetic construct
  source 1..19: mol_type = other RNA
  modified_base 1: mod_base = OTHER; note = 2'-O-methyl modified nucleotide with phosphorothioate linkage
  modified_base 2: mod_base = OTHER; note = 2'-O-methyl modified nucleotide with phosphorothioate linkage
  modified_base 3: mod_base = OTHER; note = 2'-O-methyl modified nucleotide
  modified_base 4: mod_base = OTHER; note = 2'-O-methyl modified nucleotide
  modified_base 5: mod_base = OTHER; note = 2'-fluoro modified nucleotide
  modified_base 6: mod_base = OTHER; note = 2'-O-methyl modified nucleotide
  modified_base 7: mod_base = OTHER; note = 2'-fluoro modified nucleotide
  modified_base 8: mod_base = OTHER; note = 2'-fluoro modified nucleotide
  modified_base 9: mod_base = OTHER; note = 2'-fluoro modified nucleotide
  modified_base 10: mod_base = OTHER; note = 2'-O-methyl modified nucleotide
  modified_base 11: mod_base = OTHER; note = 2'-O-methyl modified nucleotide
  modified_base 12: mod_base = OTHER; note = 2'-O-methyl modified nucleotide
  modified_base 13: mod_base = OTHER; note = 2'-O-methyl modified nucleotide
  modified_base 14: mod_base = OTHER; note = 2'-O-methyl modified nucleotide
  modified_base 15: mod_base = OTHER; note = 2'-O-methyl modified nucleotide
  modified_base 16: mod_base = OTHER; note = 2'-O-methyl modified nucleotide
  modified_base 17: mod_base = OTHER; note = 2'-O-methyl modified nucleotide
  modified_base 18: mod_base = OTHER; note = 2'-O-methyl modified nucleotide
  modified_base 19: mod_base = OTHER; note = 2'-O-methyl modified nucleotide
tccagtacatctatcagaa

SEQ ID NO: 67 - RNA, 19 nt, synthetic construct
  source 1..19: mol_type = other RNA
  modified_base 1: mod_base = OTHER; note = 2'-O-methyl modified nucleotide with phosphorothioate linkage
  modified_base 2: mod_base = OTHER; note = 2'-O-methyl modified nucleotide with phosphorothioate linkage
  modified_base 3: mod_base = OTHER; note = 2'-O-methyl modified nucleotide
  modified_base 4: mod_base = OTHER; note = 2'-O-methyl modified nucleotide
  modified_base 5: mod_base = OTHER; note = 2'-fluoro modified nucleotide
  modified_base 6: mod_base = OTHER; note = 2'-O-methyl modified nucleotide
  modified_base 7: mod_base = OTHER; note = 2'-fluoro modified nucleotide
  modified_base 8: mod_base = OTHER; note = 2'-fluoro modified nucleotide
  modified_base 9: mod_base = OTHER; note = 2'-fluoro modified nucleotide
  modified_base 10: mod_base = OTHER; note = 2'-O-methyl modified nucleotide
  modified_base 11: mod_base = OTHER; note = 2'-O-methyl modified nucleotide
  modified_base 12: mod_base = OTHER; note = 2'-O-methyl modified nucleotide
  modified_base 13: mod_base = OTHER; note = 2'-O-methyl modified nucleotide
  modified_base 14: mod_base = OTHER; note = 2'-O-methyl modified nucleotide
  modified_base 15: mod_base = OTHER; note = 2'-O-methyl modified nucleotide
  modified_base 16: mod_base = OTHER; note = 2'-O-methyl modified nucleotide
  modified_base 17: mod_base = OTHER; note = 2'-O-methyl modified nucleotide
  modified_base 18: mod_base = OTHER; note = 2'-O-methyl modified nucleotide
  modified_base 19: mod_base = OTHER; note = 2'-O-methyl modified nucleotide
ccagtacatctatcagaaa

SEQ ID NO: 68 - RNA, 19 nt, synthetic construct
  source 1..19: mol_type = other RNA
  modified_base 1: mod_base = OTHER; note = 2'-O-methyl modified nucleotide with phosphorothioate linkage
  modified_base 2: mod_base = OTHER; note = 2'-O-methyl modified nucleotide with phosphorothioate linkage
  modified_base 3: mod_base = OTHER; note = 2'-O-methyl modified nucleotide
  modified_base 4: mod_base = OTHER; note = 2'-O-methyl modified nucleotide
  modified_base 5: mod_base = OTHER; note = 2'-fluoro modified nucleotide
  modified_base 6: mod_base = OTHER; note = 2'-O-methyl modified nucleotide
  modified_base 7: mod_base = OTHER; note = 2'-fluoro modified nucleotide
  modified_base 8: mod_base = OTHER; note = 2'-fluoro modified nucleotide
  modified_base 9: mod_base = OTHER; note = 2'-fluoro modified nucleotide
  modified_base 10: mod_base = OTHER; note = 2'-O-methyl modified nucleotide
  modified_base 11: mod_base = OTHER; note = 2'-O-methyl modified nucleotide
  modified_base 12: mod_base = OTHER; note = 2'-O-methyl modified nucleotide
  modified_base 13: mod_base = OTHER; note = 2'-O-methyl modified nucleotide
  modified_base 14: mod_base = OTHER; note = 2'-O-methyl modified nucleotide
  modified_base 15: mod_base = OTHER; note = 2'-O-methyl modified nucleotide
  modified_base 16: mod_base = OTHER; note = 2'-O-methyl modified nucleotide
  modified_base 17: mod_base = OTHER; note = 2'-O-methyl modified nucleotide
  modified_base 18: mod_base = OTHER; note = 2'-O-methyl modified nucleotide
  modified_base 19: mod_base = OTHER; note = 2'-O-methyl modified nucleotide
atctatcagaatcatcaaa

SEQ ID NO: 69 - RNA, 19 nt, synthetic construct
  source 1..19: mol_type = other RNA
  modified_base 1: mod_base = OTHER; note = 2'-O-methyl modified nucleotide with phosphorothioate linkage
  modified_base 2: mod_base = OTHER; note = 2'-O-methyl modified nucleotide with phosphorothioate linkage
  modified_base 3: mod_base = OTHER; note = 2'-O-methyl modified nucleotide
  modified_base 4: mod_base = OTHER; note = 2'-O-methyl modified nucleotide
  modified_base 5: mod_base = OTHER; note = 2'-fluoro modified nucleotide
  modified_base 6: mod_base = OTHER; note = 2'-O-methyl modified nucleotide
  modified_base 7: mod_base = OTHER; note = 2'-fluoro modified nucleotide
  modified_base 8: mod_base = OTHER; note = 2'-fluoro modified nucleotide
  modified_base 9: mod_base = OTHER; note = 2'-fluoro modified nucleotide
  modified_base 10: mod_base = OTHER; note = 2'-O-methyl modified nucleotide
  modified_base 11: mod_base = OTHER; note = 2'-O-methyl modified nucleotide
  modified_base 12: mod_base = OTHER; note = 2'-O-methyl modified nucleotide
  modified_base 13: mod_base = OTHER; note = 2'-O-methyl modified nucleotide
  modified_base 14: mod_base = OTHER; note = 2'-O-methyl modified nucleotide
  modified_base 15: mod_base = OTHER; note = 2'-O-methyl modified nucleotide
  modified_base 16: mod_base = OTHER; note = 2'-O-methyl modified nucleotide
  modified_base 17: mod_base = OTHER; note = 2'-O-methyl modified nucleotide
  modified_base 18: mod_base = OTHER; note = 2'-O-methyl modified nucleotide
  modified_base 19: mod_base = OTHER; note = 2'-O-methyl modified nucleotide
aagtcactcaattcctgaa

SEQ ID NO: 70 - RNA, 19 nt, synthetic construct
  source 1..19: mol_type = other RNA
  modified_base 1: mod_base = OTHER; note = 2'-O-methyl modified nucleotide with phosphorothioate linkage
  modified_base 2: mod_base = OTHER; note = 2'-O-methyl modified nucleotide with phosphorothioate linkage
  modified_base 3: mod_base = OTHER; note = 2'-O-methyl modified nucleotide
  modified_base 4: mod_base = OTHER; note = 2'-O-methyl modified nucleotide
  modified_base 5: mod_base = OTHER; note = 2'-fluoro modified nucleotide
  modified_base 6: mod_base = OTHER; note = 2'-O-methyl modified nucleotide
  modified_base 7: mod_base = OTHER; note = 2'-fluoro modified nucleotide
  modified_base 8: mod_base = OTHER; note = 2'-fluoro modified nucleotide
  modified_base 9: mod_base = OTHER; note = 2'-fluoro modified nucleotide
  modified_base 10: mod_base = OTHER; note = 2'-O-methyl modified nucleotide
  modified_base 11: mod_base = OTHER; note = 2'-O-methyl modified nucleotide
  modified_base 12: mod_base = OTHER; note = 2'-O-methyl modified nucleotide
  modified_base 13: mod_base = OTHER; note = 2'-O-methyl modified nucleotide
  modified_base 14: mod_base = OTHER; note = 2'-O-methyl modified nucleotide
  modified_base 15: mod_base = OTHER; note = 2'-O-methyl modified nucleotide
  modified_base 16: mod_base = OTHER; note = 2'-O-methyl modified nucleotide
  modified_base 17: mod_base = OTHER; note = 2'-O-methyl modified nucleotide
  modified_base 18: mod_base = OTHER; note = 2'-O-methyl modified nucleotide
  modified_base 19: mod_base = OTHER; note = 2'-O-methyl modified nucleotide
cctgaactaatcaatataa

SEQ ID NO: 71 - RNA, 19 nt, synthetic construct
  source 1..19: mol_type = other RNA
  modified_base 1: mod_base = OTHER; note = 2'-O-methyl modified nucleotide with phosphorothioate linkage
  modified_base 2: mod_base = OTHER; note = 2'-O-methyl modified nucleotide with phosphorothioate linkage
  modified_base 3: mod_base = OTHER; note = 2'-O-methyl modified nucleotide
  modified_base 4: mod_base = OTHER; note = 2'-O-methyl modified nucleotide
  modified_base 5: mod_base = OTHER; note = 2'-fluoro modified nucleotide
  modified_base 6: mod_base = OTHER; note = 2'-O-methyl modified nucleotide
  modified_base 7: mod_base = OTHER; note = 2'-fluoro modified nucleotide
  modified_base 8: mod_base = OTHER; note = 2'-fluoro modified nucleotide
  modified_base 9: mod_base = OTHER; note = 2'-fluoro modified nucleotide
  modified_base 10: mod_base = OTHER; note = 2'-O-methyl modified nucleotide
  modified_base 11: mod_base = OTHER; note = 2'-O-methyl modified nucleotide
  modified_base 12: mod_base = OTHER; note = 2'-O-methyl modified nucleotide
  modified_base 13: mod_base = OTHER; note = 2'-O-methyl modified nucleotide
  modified_base 14: mod_base = OTHER; note = 2'-O-methyl modified nucleotide
  modified_base 15: mod_base = OTHER; note = 2'-O-methyl modified nucleotide
  modified_base 16: mod_base = OTHER; note = 2'-O-methyl modified nucleotide
  modified_base 17: mod_base = OTHER; note = 2'-O-methyl modified nucleotide
  modified_base 18: mod_base = OTHER; note = 2'-O-methyl modified nucleotide
  modified_base 19: mod_base = OTHER; note = 2'-O-methyl modified nucleotide
tgaactaatcaatatataa

SEQ ID NO: 72 - RNA, 19 nt, synthetic construct
  source 1..19: mol_type = other RNA
  modified_base 1: mod_base = OTHER; note = 2'-O-methyl modified nucleotide with phosphorothioate linkage
  modified_base 2: mod_base = OTHER; note = 2'-O-methyl modified nucleotide with phosphorothioate linkage
  modified_base 3: mod_base = OTHER; note = 2'-O-methyl modified nucleotide
  modified_base 4: mod_base = OTHER; note = 2'-O-methyl modified nucleotide
  modified_base 5: mod_base = OTHER; note = 2'-fluoro modified nucleotide
  modified_base 6: mod_base = OTHER; note = 2'-O-methyl modified nucleotide
  modified_base 7: mod_base = OTHER; note = 2'-fluoro modified nucleotide
  modified_base 8: mod_base = OTHER; note = 2'-fluoro modified nucleotide
  modified_base 9: mod_base = OTHER; note = 2'-fluoro modified nucleotide
  modified_base 10: mod_base = OTHER; note = 2'-O-methyl modified nucleotide
  modified_base 11: mod_base = OTHER; note = 2'-O-methyl modified nucleotide
  modified_base 12: mod_base = OTHER; note = 2'-O-methyl modified nucleotide
  modified_base 13: mod_base = OTHER; note = 2'-O-methyl modified nucleotide
  modified_base 14: mod_base = OTHER; note = 2'-O-methyl modified nucleotide
  modified_base 15: mod_base = OTHER; note = 2'-O-methyl modified nucleotide
  modified_base 16: mod_base = OTHER; note = 2'-O-methyl modified nucleotide
  modified_base 17: mod_base = OTHER; note = 2'-O-methyl modified nucleotide
  modified_base 18: mod_base = OTHER; note = 2'-O-methyl modified nucleotide
  modified_base 19: mod_base = OTHER; note = 2'-O-methyl modified nucleotide
tggttctcattccttgcaa

SEQ ID NO: 73 - RNA, 19 nt, synthetic construct
  source 1..19: mol_type = other RNA
  modified_base 1: mod_base = OTHER; note = 2'-O-methyl modified nucleotide with phosphorothioate linkage
  modified_base 2: mod_base = OTHER; note = 2'-O-methyl modified nucleotide with phosphorothioate linkage
  modified_base 3: mod_base = OTHER; note = 2'-O-methyl modified nucleotide
  modified_base 4: mod_base = OTHER; note = 2'-O-methyl modified nucleotide
  modified_base 5: mod_base = OTHER; note = 2'-fluoro modified nucleotide
  modified_base 6: mod_base = OTHER; note = 2'-O-methyl modified nucleotide
  modified_base 7: mod_base = OTHER; note = 2'-fluoro modified nucleotide
  modified_base 8: mod_base = OTHER; note = 2'-fluoro modified nucleotide
  modified_base 9: mod_base = OTHER; note = 2'-fluoro modified nucleotide
  modified_base 10: mod_base = OTHER; note = 2'-O-methyl modified nucleotide
  modified_base 11: mod_base = OTHER; note = 2'-O-methyl modified nucleotide
  modified_base 12: mod_base = OTHER; note = 2'-O-methyl modified nucleotide
  modified_base 13: mod_base = OTHER; note = 2'-O-methyl modified nucleotide
  modified_base 14: mod_base = OTHER; note = 2'-O-methyl modified nucleotide
  modified_base 15: mod_base = OTHER; note = 2'-O-methyl modified nucleotide
  modified_base 16: mod_base = OTHER; note = 2'-O-methyl modified nucleotide
  modified_base 17: mod_base = OTHER; note = 2'-O-methyl modified nucleotide
  modified_base 18: mod_base = OTHER; note = 2'-O-methyl modified nucleotide
  modified_base 19: mod_base = OTHER; note = 2'-O-methyl modified nucleotide
ctcattccttgcaccataa

SEQ ID NO: 74 - RNA, 19 nt, synthetic construct
  source 1..19: mol_type = other RNA
  modified_base 1: mod_base = OTHER; note = 2'-O-methyl modified nucleotide with phosphorothioate linkage
  modified_base 2: mod_base = OTHER; note = 2'-O-methyl modified nucleotide with phosphorothioate linkage
  modified_base 3: mod_base = OTHER; note = 2'-O-methyl modified nucleotide
  modified_base 4: mod_base = OTHER; note = 2'-O-methyl modified nucleotide
  modified_base 5: mod_base = OTHER; note = 2'-fluoro modified nucleotide
  modified_base 6: mod_base = OTHER; note = 2'-O-methyl modified nucleotide
  modified_base 7: mod_base = OTHER; note = 2'-fluoro modified nucleotide
  modified_base 8: mod_base = OTHER; note = 2'-fluoro modified nucleotide
  modified_base 9: mod_base = OTHER; note = 2'-fluoro modified nucleotide
  modified_base 10: mod_base = OTHER; note = 2'-O-methyl modified nucleotide
  modified_base 11: mod_base = OTHER; note = 2'-O-methyl modified nucleotide
  modified_base 12: mod_base = OTHER; note = 2'-O-methyl modified nucleotide
  modified_base 13: mod_base = OTHER; note = 2'-O-methyl modified nucleotide
  modified_base 14: mod_base = OTHER; note = 2'-O-methyl modified nucleotide
  modified_base 15: mod_base = OTHER; note = 2'-O-methyl modified nucleotide
  modified_base 16: mod_base = OTHER; note = 2'-O-methyl modified nucleotide
  modified_base 17: mod_base = OTHER; note = 2'-O-methyl modified nucleotide
  modified_base 18: mod_base = OTHER; note = 2'-O-methyl modified nucleotide
  modified_base 19: mod_base = OTHER; note = 2'-O-methyl modified nucleotide
ttggctttctgctgggtta

SEQ ID NO: 75 - RNA, 19 nt, synthetic construct
  source 1..19: mol_type = other RNA
  modified_base 1: mod_base = OTHER; note = 2'-O-methyl modified nucleotide with phosphorothioate linkage
  modified_base 2: mod_base = OTHER; note = 2'-O-methyl modified nucleotide with phosphorothioate linkage
  modified_base 3: mod_base = OTHER; note = 2'-O-methyl modified nucleotide
  modified_base 4: mod_base = OTHER; note = 2'-O-methyl modified nucleotide
  modified_base 5: mod_base = OTHER; note = 2'-fluoro modified nucleotide
  modified_base 6: mod_base = OTHER; note = 2'-O-methyl modified nucleotide
  modified_base 7: mod_base = OTHER; note = 2'-fluoro modified nucleotide
  modified_base 8: mod_base = OTHER; note = 2'-fluoro modified nucleotide
  modified_base 9: mod_base = OTHER; note = 2'-fluoro modified nucleotide
  modified_base 10: mod_base = OTHER; note = 2'-O-methyl modified nucleotide
  modified_base 11: mod_base = OTHER; note = 2'-O-methyl modified nucleotide
  modified_base 12: mod_base = OTHER; note = 2'-O-methyl modified nucleotide
  modified_base 13: mod_base = OTHER; note = 2'-O-methyl modified nucleotide
  modified_base 14: mod_base = OTHER; note = 2'-O-methyl modified nucleotide
  modified_base 15: mod_base = OTHER; note = 2'-O-methyl modified nucleotide
  modified_base 16: mod_base = OTHER; note = 2'-O-methyl modified nucleotide
  modified_base 17: mod_base = OTHER; note = 2'-O-methyl modified nucleotide
  modified_base 18: mod_base = OTHER; note = 2'-O-methyl modified nucleotide
  modified_base 19: mod_base = OTHER; note = 2'-O-methyl modified nucleotide
tcctctacatgattttcca

SEQ ID NO: 76 - RNA, 19 nt, synthetic construct
  source 1..19: mol_type = other RNA
  modified_base 1: mod_base = OTHER; note = 2'-O-methyl modified nucleotide with phosphorothioate linkage
  modified_base 2: mod_base = OTHER; note = 2'-O-methyl modified nucleotide with phosphorothioate linkage
  modified_base 3: mod_base = OTHER; note = 2'-fluoro modified nucleotide
  modified_base 4: mod_base = OTHER; note = 2'-O-methyl modified nucleotide
  modified_base 5: mod_base = OTHER; note = 2'-O-methyl modified nucleotide
  modified_base 6: mod_base = OTHER; note = 2'-O-methyl modified nucleotide
  modified_base 7: mod_base = OTHER; note = 2'-fluoro modified nucleotide
  modified_base 8: mod_base = OTHER; note = 2'-fluoro modified nucleotide
  modified_base 9: mod_base = OTHER; note = 2'-fluoro modified nucleotide
  modified_base 10: mod_base = OTHER; note = 2'-O-methyl modified nucleotide
  modified_base 11: mod_base = OTHER; note = 2'-O-methyl modified nucleotide
  modified_base 12: mod_base = OTHER; note = 2'-fluoro modified nucleotide
  modified_base 13: mod_base = OTHER; note = 2'-O-methyl modified nucleotide
  modified_base 14: mod_base = OTHER; note = 2'-O-methyl modified nucleotide
  modified_base 15: mod_base = OTHER; note = 2'-O-methyl modified nucleotide
  modified_base 16: mod_base = OTHER; note = 2'-O-methyl modified nucleotide
  modified_base 17: mod_base = OTHER; note = 2'-fluoro modified nucleotide
  modified_base 18: mod_base = OTHER; note = 2'-O-methyl modified nucleotide
  modified_base 19: mod_base = OTHER; note = 2'-O-methyl modified nucleotide
agatcaaggctcacttata

SEQ ID NO: 77 - RNA, 19 nt, synthetic construct
  source 1..19: mol_type = other RNA
  modified_base 1: mod_base = OTHER; note = 2'-O-methyl modified nucleotide with phosphorothioate linkage
  modified_base 2: mod_base = OTHER; note = 2'-O-methyl modified nucleotide with phosphorothioate linkage
  modified_base 3: mod_base = OTHER; note = 2'-fluoro modified nucleotide
  modified_base 4: mod_base = OTHER; note = 2'-O-methyl modified nucleotide
  modified_base 5: mod_base = OTHER; note = 2'-O-methyl modified nucleotide
  modified_base 6: mod_base = OTHER; note = 2'-O-methyl modified nucleotide
  modified_base 7: mod_base = OTHER; note = 2'-fluoro modified nucleotide
  modified_base 8: mod_base = OTHER; note = 2'-fluoro modified nucleotide
  modified_base 9: mod_base = OTHER; note = 2'-fluoro modified nucleotide
  modified_base 10: mod_base = OTHER; note = 2'-O-methyl modified nucleotide
  modified_base 11: mod_base = OTHER; note = 2'-O-methyl modified nucleotide
  modified_base 12: mod_base = OTHER; note = 2'-fluoro modified nucleotide
  modified_base 13: mod_base = OTHER; note = 2'-O-methyl modified nucleotide
  modified_base 14: mod_base = OTHER; note = 2'-O-methyl modified nucleotide
  modified_base 15: mod_base = OTHER; note = 2'-O-methyl modified nucleotide
  modified_base 16: mod_base = OTHER; note = 2'-O-methyl modified nucleotide
  modified_base 17: mod_base = OTHER; note = 2'-fluoro modified nucleotide
  modified_base 18: mod_base = OTHER; note = 2'-O-methyl modified nucleotide
  modified_base 19: mod_base = OTHER; note = 2'-O-methyl modified nucleotide
tcagcattgtgatgaccaa

SEQ ID NO: 78 - RNA, 19 nt, synthetic construct
  source 1..19: mol_type = other RNA
  modified_base 1: mod_base = OTHER; note = 2'-O-methyl modified nucleotide with phosphorothioate linkage
  modified_base 2: mod_base = OTHER; note = 2'-O-methyl modified nucleotide with phosphorothioate linkage
  modified_base 3: mod_base = OTHER; note = 2'-fluoro modified nucleotide
  modified_base 4: mod_base = OTHER; note = 2'-O-methyl modified nucleotide
  modified_base 5: mod_base = OTHER; note = 2'-O-methyl modified nucleotide
  modified_base 6: mod_base = OTHER; note = 2'-O-methyl modified nucleotide
  modified_base 7: mod_base = OTHER; note = 2'-fluoro modified nucleotide
  modified_base 8: mod_base = OTHER; note = 2'-fluoro modified nucleotide
  modified_base 9: mod_base = OTHER; note = 2'-fluoro modified nucleotide
  modified_base 10: mod_base = OTHER; note = 2'-O-methyl modified nucleotide
  modified_base 11: mod_base = OTHER; note = 2'-O-methyl modified nucleotide
  modified_base 12: mod_base = OTHER; note = 2'-fluoro modified nucleotide
  modified_base 13: mod_base = OTHER; note = 2'-O-methyl modified nucleotide
  modified_base 14: mod_base = OTHER; note = 2'-O-methyl modified nucleotide
  modified_base 15: mod_base = OTHER; note = 2'-O-methyl modified nucleotide
  modified_base 16: mod_base = OTHER; note = 2'-O-methyl modified nucleotide
  modified_base 17: mod_base = OTHER; note = 2'-fluoro modified nucleotide
  modified_base 18: mod_base = OTHER; note = 2'-O-methyl modified nucleotide
  modified_base 19: mod_base = OTHER; note = 2'-O-methyl modified nucleotide
tcatcattctcttgtgcaa

SEQ ID NO: 79 - RNA, 19 nt, synthetic construct
  source 1..19: mol_type = other RNA
  modified_base 1: mod_base = OTHER; note = 2'-O-methyl modified nucleotide with phosphorothioate linkage
  modified_base 2: mod_base = OTHER; note = 2'-O-methyl modified nucleotide with phosphorothioate linkage
  modified_base 3: mod_base = OTHER; note = 2'-fluoro modified nucleotide
  modified_base 4: mod_base = OTHER; note = 2'-O-methyl modified nucleotide
  modified_base 5: mod_base = OTHER; note = 2'-O-methyl modified nucleotide
  modified_base 6: mod_base = OTHER; note = 2'-O-methyl modified nucleotide
  modified_base 7: mod_base = OTHER; note = 2'-fluoro modified nucleotide
  modified_base 8: mod_base = OTHER; note = 2'-fluoro modified nucleotide
  modified_base 9: mod_base = OTHER; note = 2'-fluoro modified nucleotide
  modified_base 10: mod_base = OTHER; note = 2'-O-methyl modified nucleotide
  modified_base 11: mod_base = OTHER; note = 2'-O-methyl modified nucleotide
  modified_base 12: mod_base = OTHER; note = 2'-fluoro modified nucleotide
  modified_base 13: mod_base = OTHER; note = 2'-O-methyl modified nucleotide
  modified_base 14: mod_base = OTHER; note = 2'-O-methyl modified nucleotide
  modified_base 15: mod_base = OTHER; note = 2'-O-methyl modified nucleotide
  modified_base 16: mod_base = OTHER; note = 2'-O-methyl modified nucleotide
  modified_base 17: mod_base = OTHER; note = 2'-fluoro modified nucleotide
  modified_base 18: mod_base = OTHER; note = 2'-O-methyl modified nucleotide
  modified_base 19: mod_base = OTHER; note = 2'-O-methyl modified nucleotide
tggccgtcacagttctcta

SEQ ID NO: 80 - RNA, 19 nt, synthetic construct
  source 1..19: mol_type = other RNA
  modified_base 1: mod_base = OTHER; note = 2'-O-methyl modified nucleotide with phosphorothioate linkage
  modified_base 2: mod_base = OTHER; note = 2'-O-methyl modified nucleotide with phosphorothioate linkage
  modified_base 3: mod_base = OTHER; note = 2'-fluoro modified nucleotide
  modified_base 4: mod_base = OTHER; note = 2'-O-methyl modified nucleotide
  modified_base 5: mod_base = OTHER; note = 2'-O-methyl modified nucleotide
  modified_base 6: mod_base = OTHER; note = 2'-O-methyl modified nucleotide
  modified_base 7: mod_base = OTHER; note = 2'-fluoro modified nucleotide
  modified_base 8: mod_base = OTHER; note = 2'-fluoro modified nucleotide
  modified_base 9: mod_base = OTHER; note = 2'-fluoro modified nucleotide
  modified_base 10: mod_base = OTHER; note = 2'-O-methyl modified nucleotide
  modified_base 11: mod_base = OTHER; note = 2'-O-methyl modified nucleotide
  modified_base 12: mod_base = OTHER; note = 2'-fluoro modified nucleotide
  modified_base 13: mod_base = OTHER; note = 2'-O-methyl modified nucleotide
  modified_base 14: mod_base = OTHER; note = 2'-O-methyl modified nucleotide
  modified_base 15: mod_base = OTHER; note = 2'-O-methyl modified nucleotide
  modified_base 16: mod_base = OTHER; note = 2'-O-methyl modified nucleotide
  modified_base 17: mod_base = OTHER; note = 2'-fluoro modified nucleotide
  modified_base 18: mod_base = OTHER; note = 2'-O-methyl modified nucleotide
  modified_base 19: mod_base = OTHER; note = 2'-O-methyl modified nucleotide
tggtcccaaagcaattcta

SEQ ID NO: 81 - RNA, 19 nt, synthetic construct
  source 1..19: mol_type = other RNA
  modified_base 1: mod_base = OTHER; note = 2'-O-methyl modified nucleotide with phosphorothioate linkage
  modified_base 2: mod_base = OTHER; note = 2'-O-methyl modified nucleotide with phosphorothioate linkage
  modified_base 3: mod_base = OTHER; note = 2'-fluoro modified nucleotide
  modified_base 4: mod_base = OTHER; note = 2'-O-methyl modified nucleotide
  modified_base 5: mod_base = OTHER; note = 2'-O-methyl modified nucleotide
  modified_base 6: mod_base = OTHER; note = 2'-O-methyl modified nucleotide
  modified_base 7: mod_base = OTHER; note = 2'-fluoro modified nucleotide
  modified_base 8: mod_base = OTHER; note = 2'-fluoro modified nucleotide
  modified_base 9: mod_base = OTHER; note = 2'-fluoro modified nucleotide
  modified_base 10: mod_base = OTHER; note = 2'-O-methyl modified nucleotide
  modified_base 11: mod_base = OTHER; note = 2'-O-methyl modified nucleotide
  modified_base 12: mod_base = OTHER; note = 2'-fluoro modified nucleotide
  modified_base 13: mod_base = OTHER; note = 2'-O-methyl modified nucleotide
  modified_base 14: mod_base = OTHER; note = 2'-O-methyl modified nucleotide
  modified_base 15: mod_base = OTHER; note = 2'-O-methyl modified nucleotide
  modified_base 16: mod_base = OTHER; note = 2'-O-methyl modified nucleotide
  modified_base 17: mod_base = OTHER; note = 2'-fluoro modified nucleotide
  modified_base 18: mod_base = OTHER; note = 2'-O-methyl modified nucleotide
  modified_base 19: mod_base = OTHER; note = 2'-O-methyl modified nucleotide
tccagtacatctatcagaa

SEQ ID NO: 82 - RNA, 19 nt, synthetic construct
  source 1..19: mol_type = other RNA
  modified_base 1: mod_base = OTHER; note = 2'-O-methyl modified nucleotide with phosphorothioate linkage
  modified_base 2: mod_base = OTHER; note = 2'-O-methyl modified nucleotide with phosphorothioate linkage
  modified_base 3: mod_base = OTHER; note = 2'-fluoro modified nucleotide
  modified_base 4: mod_base = OTHER; note = 2'-O-methyl modified nucleotide
  modified_base 5: mod_base = OTHER; note = 2'-O-methyl modified nucleotide
  modified_base 6: mod_base = OTHER; note = 2'-O-methyl modified nucleotide
  modified_base 7: mod_base = OTHER; note = 2'-fluoro modified nucleotide
  modified_base 8: mod_base = OTHER; note = 2'-fluoro modified nucleotide
  modified_base 9: mod_base = OTHER; note = 2'-fluoro modified nucleotide
  modified_base 10: mod_base = OTHER; note = 2'-O-methyl modified nucleotide
  modified_base 11: mod_base = OTHER; note = 2'-O-methyl modified nucleotide
  modified_base 12: mod_base = OTHER; note = 2'-fluoro modified nucleotide
  modified_base 13: mod_base = OTHER; note = 2'-O-methyl modified nucleotide
  modified_base 14: mod_base = OTHER; note = 2'-O-methyl modified nucleotide
  modified_base 15: mod_base = OTHER; note = 2'-O-methyl modified nucleotide
  modified_base 16: mod_base = OTHER; note = 2'-O-methyl modified nucleotide
  modified_base 17: mod_base = OTHER; note = 2'-fluoro modified nucleotide
  modified_base 18: mod_base = OTHER; note = 2'-O-methyl modified nucleotide
  modified_base 19: mod_base = OTHER; note = 2'-O-methyl modified nucleotide
ccagtacatctatcagaaa

SEQ ID NO: 83 - RNA, 19 nt, synthetic construct
  source 1..19: mol_type = other RNA
  modified_base 1: mod_base = OTHER; note = 2'-O-methyl modified nucleotide with phosphorothioate linkage
  modified_base 2: mod_base = OTHER; note = 2'-O-methyl modified nucleotide with phosphorothioate linkage
  modified_base 3: mod_base = OTHER; note = 2'-fluoro modified nucleotide
  modified_base 4: mod_base = OTHER; note = 2'-O-methyl modified nucleotide
  modified_base 5: mod_base = OTHER; note = 2'-O-methyl modified nucleotide
  modified_base 6: mod_base = OTHER; note = 2'-O-methyl modified nucleotide
  modified_base 7: mod_base = OTHER; note = 2'-fluoro modified nucleotide
  modified_base 8: mod_base = OTHER; note = 2'-fluoro modified nucleotide
  modified_base 9: mod_base = OTHER; note = 2'-fluoro modified nucleotide
  modified_base 10: mod_base = OTHER; note = 2'-O-methyl modified nucleotide
  modified_base 11: mod_base = OTHER; note = 2'-O-methyl modified nucleotide
  modified_base 12: mod_base = OTHER; note = 2'-fluoro modified nucleotide
  modified_base 13: mod_base = OTHER; note = 2'-O-methyl modified nucleotide
  modified_base 14: mod_base = OTHER; note = 2'-O-methyl modified nucleotide
  modified_base 15: mod_base = OTHER; note = 2'-O-methyl modified nucleotide
  modified_base 16: mod_base = OTHER; note = 2'-O-methyl modified nucleotide
  modified_base 17: mod_base = OTHER; note = 2'-fluoro modified nucleotide
  modified_base 18: mod_base = OTHER; note = 2'-O-methyl modified nucleotide
  modified_base 19: mod_base = OTHER; note = 2'-O-methyl modified nucleotide
atctatcagaatcatcaaa

SEQ ID NO: 84 - RNA, 19 nt, synthetic construct
  source 1..19: mol_type = other RNA
  modified_base 1: mod_base = OTHER; note = 2'-O-methyl modified nucleotide with phosphorothioate linkage
  modified_base 2: mod_base = OTHER; note = 2'-O-methyl modified nucleotide with phosphorothioate linkage
  modified_base 3: mod_base = OTHER; note = 2'-fluoro modified nucleotide
  modified_base 4: mod_base = OTHER; note = 2'-O-methyl modified nucleotide
  modified_base 5: mod_base = OTHER; note = 2'-O-methyl modified nucleotide
  modified_base 6: mod_base = OTHER; note = 2'-O-methyl modified nucleotide
  modified_base 7: mod_base = OTHER; note = 2'-fluoro modified nucleotide
  modified_base 8: mod_base = OTHER; note = 2'-fluoro modified nucleotide
  modified_base 9: mod_base = OTHER; note = 2'-fluoro modified nucleotide
  modified_base 10: mod_base = OTHER; note = 2'-O-methyl modified nucleotide
  modified_base 11: mod_base = OTHER; note = 2'-O-methyl modified nucleotide
  modified_base 12: mod_base = OTHER; note = 2'-fluoro modified nucleotide
  modified_base 13: mod_base = OTHER; note = 2'-O-methyl modified nucleotide
  modified_base 14: mod_base = OTHER; note = 2'-O-methyl modified nucleotide
  modified_base 15: mod_base = OTHER; note = 2'-O-methyl modified nucleotide
  modified_base 16: mod_base = OTHER; note = 2'-O-methyl modified nucleotide
  modified_base 17: mod_base = OTHER; note = 2'-fluoro modified nucleotide
  modified_base 18: mod_base = OTHER; note = 2'-O-methyl modified nucleotide
  modified_base 19: mod_base = OTHER; note = 2'-O-methyl modified nucleotide
aagtcactcaattcctgaa

SEQ ID NO: 85 - RNA, 19 nt, synthetic construct
  source 1..19: mol_type = other RNA
  modified_base 1: mod_base = OTHER; note = 2'-O-methyl modified nucleotide with phosphorothioate linkage
  modified_base 2: mod_base = OTHER; note = 2'-O-methyl modified nucleotide with phosphorothioate linkage
  modified_base 3: mod_base = OTHER; note = 2'-fluoro modified nucleotide
  modified_base 4: mod_base = OTHER; note = 2'-O-methyl modified nucleotide
  modified_base 5: mod_base = OTHER; note = 2'-O-methyl modified nucleotide
  modified_base 6: mod_base = OTHER; note = 2'-O-methyl modified nucleotide
  modified_base 7: mod_base = OTHER; note = 2'-fluoro modified nucleotide
  modified_base 8: mod_base = OTHER; note = 2'-fluoro modified nucleotide
  modified_base 9: mod_base = OTHER; note = 2'-fluoro modified nucleotide
  modified_base 10: mod_base = OTHER; note = 2'-O-methyl modified nucleotide
  modified_base 11: mod_base = OTHER; note = 2'-O-methyl modified nucleotide
  modified_base 12: mod_base = OTHER; note = 2'-fluoro modified nucleotide
  modified_base 13: mod_base = OTHER; note = 2'-O-methyl modified nucleotide
  modified_base 14: mod_base = OTHER; note = 2'-O-methyl modified nucleotide
  modified_base 15: mod_base = OTHER; note = 2'-O-methyl modified nucleotide
  modified_base 16: mod_base = OTHER; note = 2'-O-methyl modified nucleotide
  modified_base 17: mod_base = OTHER; note = 2'-fluoro modified nucleotide
  modified_base 18: mod_base = OTHER; note = 2'-O-methyl modified nucleotide
  modified_base 19: mod_base = OTHER; note = 2'-O-methyl modified nucleotide
cctgaactaatcaatataa

SEQ ID NO: 86 - RNA, 19 nt, synthetic construct
  source 1..19: mol_type = other RNA
  modified_base 1: mod_base = OTHER; note = 2'-O-methyl modified nucleotide with phosphorothioate linkage
  modified_base 2: mod_base = OTHER; note = 2'-O-methyl modified nucleotide with phosphorothioate linkage
  modified_base 3: mod_base = OTHER; note = 2'-fluoro modified nucleotide
  modified_base 4: mod_base = OTHER; note = 2'-O-methyl modified nucleotide
  modified_base 5: mod_base = OTHER; note = 2'-O-methyl modified nucleotide
  modified_base 6: mod_base = OTHER; note = 2'-O-methyl modified nucleotide
  modified_base 7: mod_base = OTHER; note = 2'-fluoro modified nucleotide
  modified_base 8: mod_base = OTHER; note = 2'-fluoro modified nucleotide
  modified_base 9: mod_base = OTHER; note = 2'-fluoro modified nucleotide
  modified_base 10: mod_base = OTHER; note = 2'-O-methyl modified nucleotide
  modified_base 11: mod_base = OTHER; note = 2'-O-methyl modified nucleotide
  modified_base 12: mod_base = OTHER; note = 2'-fluoro modified nucleotide
  modified_base 13: mod_base = OTHER; note = 2'-O-methyl modified nucleotide
  modified_base 14: mod_base = OTHER; note = 2'-O-methyl modified nucleotide
  modified_base 15: mod_base = OTHER; note = 2'-O-methyl modified nucleotide
  modified_base 16: mod_base = OTHER; note = 2'-O-methyl modified nucleotide
  modified_base 17: mod_base = OTHER; note = 2'-fluoro modified nucleotide
  modified_base 18: mod_base = OTHER; note = 2'-O-methyl modified nucleotide
  modified_base 19: mod_base = OTHER; note = 2'-O-methyl modified nucleotide
tgaactaatcaatatataa

SEQ ID NO: 87 - RNA, 19 nt, synthetic construct
  source 1..19: mol_type = other RNA
  modified_base 1: mod_base = OTHER; note = 2'-O-methyl modified nucleotide with phosphorothioate linkage
  modified_base 2: mod_base = OTHER; note = 2'-O-methyl modified nucleotide with phosphorothioate linkage
  modified_base 3: mod_base = OTHER; note = 2'-fluoro modified nucleotide
  modified_base 4: mod_base = OTHER; note = 2'-O-methyl modified nucleotide
  modified_base 5: mod_base = OTHER; note = 2'-O-methyl modified nucleotide
  modified_base 6: mod_base = OTHER; note = 2'-O-methyl modified nucleotide
  modified_base 7: mod_base = OTHER; note = 2'-fluoro modified nucleotide
  modified_base 8: mod_base = OTHER; note = 2'-fluoro modified nucleotide
  modified_base 9: mod_base = OTHER; note = 2'-fluoro modified nucleotide
  modified_base 10: mod_base = OTHER; note = 2'-O-methyl modified nucleotide
  modified_base 11: mod_base = OTHER; note = 2'-O-methyl modified nucleotide
  modified_base 12: mod_base = OTHER; note = 2'-fluoro modified nucleotide
  modified_base 13: mod_base = OTHER; note = 2'-O-methyl modified nucleotide
  modified_base 14: mod_base = OTHER; note = 2'-O-methyl modified nucleotide
  modified_base 15: mod_base = OTHER; note = 2'-O-methyl modified nucleotide
  modified_base 16: mod_base = OTHER; note = 2'-O-methyl modified nucleotide
  modified_base 17: mod_base = OTHER; note = 2'-fluoro modified nucleotide
  modified_base 18: mod_base = OTHER; note = 2'-O-methyl modified nucleotide
  modified_base 19: mod_base = OTHER; note = 2'-O-methyl modified nucleotide
tggttctcattccttgcaa

SEQ ID NO: 88 - RNA, 19 nt, synthetic construct
  source 1..19: mol_type = other RNA
  modified_base 1: mod_base = OTHER; note = 2'-O-methyl modified nucleotide with phosphorothioate linkage
  modified_base 2: mod_base = OTHER; note = 2'-O-methyl modified nucleotide with phosphorothioate linkage
  modified_base 3: mod_base = OTHER; note = 2'-fluoro modified nucleotide
  modified_base 4: mod_base = OTHER; note = 2'-O-methyl modified nucleotide
  modified_base 5: mod_base = OTHER; note = 2'-O-methyl modified nucleotide
  modified_base 6: mod_base = OTHER; note = 2'-O-methyl modified nucleotide
  modified_base 7: mod_base = OTHER; note = 2'-fluoro modified nucleotide
  modified_base 8: mod_base = OTHER; note = 2'-fluoro modified nucleotide
  modified_base 9: mod_base = OTHER; note = 2'-fluoro modified nucleotide
  modified_base 10: mod_base = OTHER; note = 2'-O-methyl modified nucleotide
  modified_base 11: mod_base = OTHER; note = 2'-O-methyl modified nucleotide
  modified_base 12: mod_base = OTHER; note = 2'-fluoro modified nucleotide
  modified_base 13: mod_base = OTHER; note = 2'-O-methyl modified nucleotide
  modified_base 14: mod_base = OTHER; note = 2'-O-methyl modified nucleotide
  modified_base 15: mod_base = OTHER; note = 2'-O-methyl modified nucleotide
  modified_base 16: mod_base = OTHER; note = 2'-O-methyl modified nucleotide
  modified_base 17: mod_base = OTHER; note = 2'-fluoro modified nucleotide
  modified_base 18: mod_base = OTHER; note = 2'-O-methyl modified nucleotide
  modified_base 19: mod_base = OTHER; note = 2'-O-methyl modified nucleotide
ctcattccttgcaccataa

SEQ ID NO: 89 - RNA, 19 nt, synthetic construct
  source 1..19: mol_type = other RNA
  modified_base 1: mod_base = OTHER; note = 2'-O-methyl modified nucleotide with phosphorothioate linkage
  modified_base 2: mod_base = OTHER; note = 2'-O-methyl modified nucleotide with phosphorothioate linkage
  modified_base 3: mod_base = OTHER; note = 2'-fluoro modified nucleotide
  modified_base 4: mod_base = OTHER; note = 2'-O-methyl modified nucleotide
  modified_base 5: mod_base = OTHER; note = 2'-O-methyl modified nucleotide
  modified_base 6: mod_base = OTHER; note = 2'-O-methyl modified nucleotide
  modified_base 7: mod_base = OTHER; note = 2'-fluoro modified nucleotide
  modified_base 8: mod_base = OTHER; note = 2'-fluoro modified nucleotide
  modified_base 9: mod_base = OTHER; note = 2'-fluoro modified nucleotide
  modified_base 10: mod_base = OTHER; note = 2'-O-methyl modified nucleotide
  modified_base 11: mod_base = OTHER; note = 2'-O-methyl modified nucleotide
  modified_base 12: mod_base = OTHER; note = 2'-fluoro modified nucleotide
  modified_base 13: mod_base = OTHER; note = 2'-O-methyl modified nucleotide
  modified_base 14: mod_base = OTHER; note = 2'-O-methyl modified nucleotide
  modified_base 15: mod_base = OTHER; note = 2'-O-methyl modified nucleotide
  modified_base 16: mod_base = OTHER; note = 2'-O-methyl modified nucleotide
  modified_base 17: mod_base = OTHER; note = 2'-fluoro modified nucleotide
  modified_base 18: mod_base = OTHER; note = 2'-O-methyl modified nucleotide
  modified_base 19: mod_base = OTHER; note = 2'-O-methyl modified nucleotide
ttggctttctgctgggtta

SEQ ID NO: 90 - RNA, 19 nt, synthetic construct
  source 1..19: mol_type = other RNA
  modified_base 1: mod_base = OTHER; note = 2'-O-methyl modified nucleotide with phosphorothioate linkage
  modified_base 2: mod_base = OTHER; note = 2'-O-methyl modified nucleotide with phosphorothioate linkage
  modified_base 3: mod_base = OTHER; note = 2'-fluoro modified nucleotide
  modified_base 4: mod_base = OTHER; note = 2'-O-methyl modified nucleotide
  modified_base 5: mod_base = OTHER; note = 2'-O-methyl modified nucleotide
  modified_base 6: mod_base = OTHER; note = 2'-O-methyl modified nucleotide
  modified_base 7: mod_base = OTHER; note = 2'-fluoro modified nucleotide
  modified_base 8: mod_base = OTHER; note = 2'-fluoro modified nucleotide
  modified_base 9: mod_base = OTHER; note = 2'-fluoro modified nucleotide
  modified_base 10: mod_base = OTHER; note = 2'-O-methyl modified nucleotide
  modified_base 11: mod_base = OTHER; note = 2'-O-methyl modified nucleotide
  modified_base 12: mod_base = OTHER; note = 2'-fluoro modified nucleotide
  modified_base 13: mod_base = OTHER; note = 2'-O-methyl modified nucleotide
  modified_base 14: mod_base = OTHER; note = 2'-O-methyl modified nucleotide
  modified_base 15: mod_base = OTHER; note = 2'-O-methyl modified nucleotide
  modified_base 16: mod_base = OTHER; note = 2'-O-methyl modified nucleotide
  modified_base 17: mod_base = OTHER; note = 2'-fluoro modified nucleotide
  modified_base 18: mod_base = OTHER; note = 2'-O-methyl modified nucleotide
  modified_base 19: mod_base = OTHER; note = 2'-O-methyl modified nucleotide
tcctctacatgattttcca

SEQ ID NO: 91 - RNA, 19 nt, synthetic construct
  source 1..19: mol_type = other RNA
  modified_base 1: mod_base = OTHER; note = 2'-O-methyl modified nucleotide with phosphorothioate linkage
  modified_base 2: mod_base = OTHER; note = 2'-O-methyl modified nucleotide with phosphorothioate linkage
  modified_base 3: mod_base = OTHER; note = 2'-O-methyl modified nucleotide
  modified_base 4: mod_base = OTHER; note = 2'-O-methyl modified nucleotide
  modified_base 5: mod_base = OTHER; note = 2'-fluoro modified nucleotide
  modified_base 6: mod_base = OTHER; note = 2'-O-methyl modified nucleotide
  modified_base 7: mod_base = OTHER; note = 2'-fluoro modified nucleotide
  modified_base 8: mod_base = OTHER; note = 2'-fluoro modified nucleotide
  modified_base 9: mod_base = OTHER; note = 2'-fluoro modified nucleotide
  modified_base 10: mod_base = OTHER; note = 2'-O-methyl modified nucleotide
  modified_base 11: mod_base = OTHER; note = 2'-O-methyl modified nucleotide
  modified_base 12: mod_base = OTHER; note = 2'-O-methyl modified nucleotide
  modified_base 13: mod_base = OTHER; note = 2'-O-methyl modified nucleotide
  modified_base 14: mod_base = OTHER; note = 2'-O-methyl modified nucleotide
  modified_base 15: mod_base = OTHER; note = 2'-O-methyl modified nucleotide
  modified_base 16: mod_base = OTHER; note = 2'-O-methyl modified nucleotide
  modified_base 17: mod_base = OTHER; note = 2'-O-methyl modified nucleotide
  modified_base 18: mod_base = OTHER; note = 2'-O-methyl modified nucleotide
  modified_base 19: mod_base = OTHER; note = 2'-O-methyl modified nucleotide
agatcaaggctcacttata

SEQ ID NO: 92 - RNA, 19 nt, synthetic construct
  source 1..19: mol_type = other RNA
  modified_base 1: mod_base = OTHER; note = 2'-O-methyl modified nucleotide with phosphorothioate linkage
  modified_base 2: mod_base = OTHER; note = 2'-O-methyl modified nucleotide with phosphorothioate linkage
  modified_base 3: mod_base = OTHER; note = 2'-O-methyl modified nucleotide
  modified_base 4: mod_base = OTHER; note = 2'-O-methyl modified nucleotide
  modified_base 5: mod_base = OTHER; note = 2'-fluoro modified nucleotide
  modified_base 6: mod_base = OTHER; note = 2'-O-methyl modified nucleotide
  modified_base 7: mod_base = OTHER; note = 2'-fluoro modified nucleotide
  modified_base 8: mod_base = OTHER; note = 2'-fluoro modified nucleotide
  modified_base 9: mod_base = OTHER; note = 2'-fluoro modified nucleotide
  modified_base 10: mod_base = OTHER; note = 2'-O-methyl modified nucleotide
  modified_base 11: mod_base = OTHER; note = 2'-O-methyl modified nucleotide
  modified_base 12: mod_base = OTHER; note = 2'-O-methyl modified nucleotide
  modified_base 13: mod_base = OTHER; note = 2'-O-methyl modified nucleotide
  modified_base 14: mod_base = OTHER; note = 2'-O-methyl modified nucleotide
  modified_base 15: mod_base = OTHER; note = 2'-O-methyl modified nucleotide
  modified_base 16: mod_base = OTHER; note = 2'-O-methyl modified nucleotide
  modified_base 17: mod_base = OTHER; note = 2'-O-methyl modified nucleotide
  modified_base 18: mod_base = OTHER; note = 2'-O-methyl modified nucleotide
  modified_base 19: mod_base = OTHER; note = 2'-O-methyl modified nucleotide
tcagcattgtgatgaccaa

SEQ ID NO: 93 - RNA, 19 nt, synthetic construct
  source 1..19: mol_type = other RNA
  modified_base 1: mod_base = OTHER; note = 2'-O-methyl modified nucleotide with phosphorothioate linkage
  modified_base 2: mod_base = OTHER; note = 2'-O-methyl modified nucleotide with phosphorothioate linkage
  modified_base 3: mod_base = OTHER; note = 2'-O-methyl modified nucleotide
  modified_base 4: mod_base = OTHER; note = 2'-O-methyl modified nucleotide
  modified_base 5: mod_base = OTHER; note = 2'-fluoro modified nucleotide
  modified_base 6: mod_base = OTHER; note = 2'-O-methyl modified nucleotide
  modified_base 7: mod_base = OTHER; note = 2'-fluoro modified nucleotide
  modified_base 8: mod_base = OTHER; note = 2'-fluoro modified nucleotide
  modified_base 9: mod_base = OTHER; note = 2'-fluoro modified nucleotide
  modified_base 10: mod_base = OTHER; note = 2'-O-methyl modified nucleotide
  modified_base 11: mod_base = OTHER; note = 2'-O-methyl modified nucleotide
  modified_base 12: mod_base = OTHER; note = 2'-O-methyl modified nucleotide
  modified_base 13: mod_base = OTHER; note = 2'-O-methyl modified nucleotide
  modified_base 14: mod_base = OTHER; note = 2'-O-methyl modified nucleotide
  modified_base 15: mod_base = OTHER; note = 2'-O-methyl modified nucleotide
  modified_base 16: mod_base = OTHER; note = 2'-O-methyl modified nucleotide
  modified_base 17: mod_base = OTHER; note = 2'-O-methyl modified nucleotide
  modified_base 18: mod_base = OTHER; note = 2'-O-methyl modified nucleotide
  modified_base 19: mod_base = OTHER; note = 2'-O-methyl modified nucleotide
tcatcattctcttgtgcaa

SEQ ID NO: 94 - RNA, 19 nt, synthetic construct
  source 1..19: mol_type = other RNA
  modified_base 1: mod_base = OTHER; note = 2'-O-methyl modified nucleotide with phosphorothioate linkage
  modified_base 2: mod_base = OTHER; note = 2'-O-methyl modified nucleotide with phosphorothioate linkage
  modified_base 3: mod_base = OTHER; note = 2'-O-methyl modified nucleotide
  modified_base 4: mod_base = OTHER; note = 2'-O-methyl modified nucleotide
  modified_base 5: mod_base = OTHER; note = 2'-fluoro modified nucleotide
  modified_base 6: mod_base = OTHER; note = 2'-O-methyl modified nucleotide
  modified_base 7: mod_base = OTHER; note = 2'-fluoro modified nucleotide
  modified_base 8: mod_base = OTHER; note = 2'-fluoro modified nucleotide
  modified_base 9: mod_base = OTHER; note = 2'-fluoro modified nucleotide
  modified_base 10: mod_base = OTHER; note = 2'-O-methyl modified nucleotide
  modified_base 11: mod_base = OTHER; note = 2'-O-methyl modified nucleotide
  modified_base 12: mod_base = OTHER; note = 2'-O-methyl modified nucleotide
  modified_base 13: mod_base = OTHER; note = 2'-O-methyl modified nucleotide
  modified_base 14: mod_base = OTHER; note = 2'-O-methyl modified nucleotide
  modified_base 15: mod_base = OTHER; note = 2'-O-methyl modified nucleotide
  modified_base 16: mod_base = OTHER; note = 2'-O-methyl modified nucleotide
  modified_base 17: mod_base = OTHER; note = 2'-O-methyl modified nucleotide
  modified_base 18: mod_base = OTHER; note = 2'-O-methyl modified nucleotide
  modified_base 19: mod_base = OTHER; note = 2'-O-methyl modified nucleotide
tggccgtcacagttctcta

SEQ ID NO: 95 - RNA, 19 nt, synthetic construct
  source 1..19: mol_type = other RNA
  modified_base 1: mod_base = OTHER; note = 2'-O-methyl modified nucleotide with phosphorothioate linkage
  modified_base 2: mod_base = OTHER; note = 2'-O-methyl modified nucleotide with phosphorothioate linkage
  modified_base 3: mod_base = OTHER; note = 2'-O-methyl modified nucleotide
  modified_base 4: mod_base = OTHER; note = 2'-O-methyl modified nucleotide
  modified_base 5: mod_base = OTHER; note = 2'-fluoro modified nucleotide
  modified_base 6: mod_base = OTHER; note = 2'-O-methyl modified nucleotide
  modified_base 7: mod_base = OTHER; note = 2'-fluoro modified nucleotide
  modified_base 8: mod_base = OTHER; note = 2'-fluoro modified nucleotide
  modified_base 9: mod_base = OTHER; note = 2'-fluoro modified nucleotide
  modified_base 10: mod_base = OTHER; note = 2'-O-methyl modified nucleotide
  modified_base 11: mod_base = OTHER; note = 2'-O-methyl modified nucleotide
  modified_base 12: mod_base = OTHER; note = 2'-O-methyl modified nucleotide
  modified_base 13: mod_base = OTHER; note = 2'-O-methyl modified nucleotide
  modified_base 14: mod_base = OTHER; note = 2'-O-methyl modified nucleotide
  modified_base 15: mod_base = OTHER; note = 2'-O-methyl modified nucleotide
  modified_base 16: mod_base = OTHER; note = 2'-O-methyl modified nucleotide
  modified_base 17: mod_base = OTHER; note = 2'-O-methyl modified nucleotide
  modified_base 18: mod_base = OTHER; note = 2'-O-methyl modified nucleotide
  modified_base 19: mod_base = OTHER; note = 2'-O-methyl modified nucleotide
tggtcccaaagcaattcta

SEQ ID NO: 96 - RNA, 19 nt, synthetic construct
  source 1..19: mol_type = other RNA
  modified_base 1: mod_base = OTHER; note = 2'-O-methyl modified nucleotide with phosphorothioate linkage
  modified_base 2: mod_base = OTHER; note = 2'-O-methyl modified nucleotide with phosphorothioate linkage
  modified_base 3: mod_base = OTHER; note = 2'-O-methyl modified nucleotide
  modified_base 4: mod_base = OTHER; note = 2'-O-methyl modified nucleotide
  modified_base 5: mod_base = OTHER; note = 2'-fluoro modified nucleotide
  modified_base 6: mod_base = OTHER; note = 2'-O-methyl modified nucleotide
  modified_base 7: mod_base = OTHER; note = 2'-fluoro modified nucleotide
  modified_base 8: mod_base = OTHER; note = 2'-fluoro modified nucleotide
  modified_base 9: mod_base = OTHER; note = 2'-fluoro modified nucleotide
  modified_base 10: mod_base = OTHER; note = 2'-O-methyl modified nucleotide
  modified_base 11: mod_base = OTHER; note = 2'-O-methyl modified nucleotide
  modified_base 12: mod_base = OTHER; note = 2'-O-methyl modified nucleotide
  modified_base 13: mod_base = OTHER; note = 2'-O-methyl modified nucleotide
  modified_base 14: mod_base = OTHER; note = 2'-O-methyl modified nucleotide
  modified_base 15: mod_base = OTHER; note = 2'-O-methyl modified nucleotide
  modified_base 16: mod_base = OTHER; note = 2'-O-methyl modified nucleotide
  modified_base 17: mod_base = OTHER; note = 2'-O-methyl modified nucleotide
  modified_base 18: mod_base = OTHER; note = 2'-O-methyl modified nucleotide
  modified_base 19: mod_base = OTHER; note = 2'-O-methyl modified nucleotide
tccagtacatctatcagaa

SEQ ID NO: 97 - RNA, 19 nt, synthetic construct
  source 1..19: mol_type = other RNA
  modified_base 1: mod_base = OTHER; note = 2'-O-methyl modified nucleotide with phosphorothioate linkage
  modified_base 2: mod_base = OTHER; note = 2'-O-methyl modified nucleotide with phosphorothioate linkage
  modified_base 3: mod_base = OTHER; note = 2'-O-methyl modified nucleotide
  modified_base 4: mod_base = OTHER; note = 2'-O-methyl modified nucleotide
  modified_base 5: mod_base = OTHER; note = 2'-fluoro modified nucleotide
  modified_base 6: mod_base = OTHER; note = 2'-O-methyl modified nucleotide
  modified_base 7: mod_base = OTHER; note = 2'-fluoro modified nucleotide
  modified_base 8: mod_base = OTHER; note = 2'-fluoro modified nucleotide
  modified_base 9: mod_base = OTHER; note = 2'-fluoro modified nucleotide
  modified_base 10: mod_base = OTHER; note = 2'-O-methyl modified nucleotide
  modified_base 11: mod_base = OTHER; note = 2'-O-methyl modified nucleotide
  modified_base 12: mod_base = OTHER; note = 2'-O-methyl modified nucleotide
  modified_base 13: mod_base = OTHER; note = 2'-O-methyl modified nucleotide
  modified_base 14: mod_base = OTHER; note = 2'-O-methyl modified nucleotide
  modified_base 15: mod_base = OTHER; note = 2'-O-methyl modified nucleotide
  modified_base 16: mod_base = OTHER; note = 2'-O-methyl modified nucleotide
  modified_base 17: mod_base = OTHER; note = 2'-O-methyl modified nucleotide
  modified_base 18: mod_base = OTHER; note = 2'-O-methyl modified nucleotide
  modified_base 19: mod_base = OTHER; note = 2'-O-methyl modified nucleotide
ccagtacatctatcagaaa

SEQ ID NO: 98 - RNA, 19 nt, synthetic construct
  source 1..19: mol_type = other RNA
  modified_base 1: mod_base = OTHER; note = 2'-O-methyl modified nucleotide with phosphorothioate linkage
  modified_base 2: mod_base = OTHER; note = 2'-O-methyl modified nucleotide with phosphorothioate linkage
  modified_base 3: mod_base = OTHER; note = 2'-O-methyl modified nucleotide
  modified_base 4: mod_base = OTHER; note = 2'-O-methyl modified nucleotide
  modified_base 5: mod_base = OTHER; note = 2'-fluoro modified nucleotide
  modified_base 6: mod_base = OTHER; note = 2'-O-methyl modified nucleotide
  modified_base 7: mod_base = OTHER; note = 2'-fluoro modified nucleotide
  modified_base 8: mod_base = OTHER; note = 2'-fluoro modified nucleotide
  modified_base 9: mod_base = OTHER; note = 2'-fluoro modified nucleotide
  modified_base 10: mod_base = OTHER; note = 2'-O-methyl modified nucleotide
  modified_base 11: mod_base = OTHER; note = 2'-O-methyl modified nucleotide
  modified_base 12: mod_base = OTHER; note = 2'-O-methyl modified nucleotide
  modified_base 13: mod_base = OTHER; note = 2'-O-methyl modified nucleotide
  modified_base 14: mod_base = OTHER; note = 2'-O-methyl modified nucleotide
  modified_base 15: mod_base = OTHER; note = 2'-O-methyl modified nucleotide
  modified_base 16: mod_base = OTHER; note = 2'-O-methyl modified nucleotide
  modified_base 17: mod_base = OTHER; note = 2'-O-methyl modified nucleotide
  modified_base 18: mod_base = OTHER; note = 2'-O-methyl modified nucleotide
  modified_base 19: mod_base = OTHER; note = 2'-O-methyl modified nucleotide
atctatcagaatcatcaaa

SEQ ID NO: 99 - RNA, 19 nt, synthetic construct
  source 1..19: mol_type = other RNA
  modified_base 1: mod_base = OTHER; note = 2'-O-methyl modified nucleotide with phosphorothioate linkage
  modified_base 2: mod_base = OTHER; note = 2'-O-methyl modified nucleotide with phosphorothioate linkage
  modified_base 3: mod_base = OTHER; note = 2'-O-methyl modified nucleotide
  modified_base 4: mod_base = OTHER; note = 2'-O-methyl modified nucleotide
  modified_base 5: mod_base = OTHER; note = 2'-fluoro modified nucleotide
  modified_base 6: mod_base = OTHER; note = 2'-O-methyl modified nucleotide
  modified_base 7: mod_base = OTHER; note = 2'-fluoro modified nucleotide
  modified_base 8: mod_base = OTHER; note = 2'-fluoro modified nucleotide
  modified_base 9: mod_base = OTHER; note = 2'-fluoro modified nucleotide
  modified_base 10: mod_base = OTHER; note = 2'-O-methyl modified nucleotide
  modified_base 11: mod_base = OTHER; note = 2'-O-methyl modified nucleotide
  modified_base 12: mod_base = OTHER; note = 2'-O-methyl modified nucleotide
  modified_base 13: mod_base = OTHER; note = 2'-O-methyl modified nucleotide
  modified_base 14: mod_base = OTHER; note = 2'-O-methyl modified nucleotide
  modified_base 15: mod_base = OTHER; note = 2'-O-methyl modified nucleotide
  modified_base 16: mod_base = OTHER; note = 2'-O-methyl modified nucleotide
  modified_base 17: mod_base = OTHER; note = 2'-O-methyl modified nucleotide
  modified_base 18: mod_base = OTHER; note = 2'-O-methyl modified nucleotide
  modified_base 19: mod_base = OTHER; note = 2'-O-methyl modified nucleotide
aagtcactcaattcctgaa

SEQ ID NO: 100 - RNA, 19 nt, synthetic construct
  source 1..19: mol_type = other RNA
  modified_base 1: mod_base = OTHER; note = 2'-O-methyl modified nucleotide with phosphorothioate linkage
  modified_base 2: mod_base = OTHER; note = 2'-O-methyl modified nucleotide with phosphorothioate linkage
  modified_base 3: mod_base = OTHER; note = 2'-O-methyl modified nucleotide
  modified_base 4: mod_base = OTHER; note = 2'-O-methyl modified nucleotide
  modified_base 5: mod_base = OTHER; note = 2'-fluoro modified nucleotide
  modified_base 6: mod_base = OTHER; note = 2'-O-methyl modified nucleotide
  modified_base 7: mod_base = OTHER; note = 2'-fluoro modified nucleotide
  modified_base 8: mod_base = OTHER; note = 2'-fluoro modified nucleotide
  modified_base 9: mod_base = OTHER; note = 2'-fluoro modified nucleotide
  modified_base 10: mod_base = OTHER; note = 2'-O-methyl modified nucleotide
  modified_base 11: mod_base = OTHER; note = 2'-O-methyl modified nucleotide
  modified_base 12: mod_base = OTHER; note = 2'-O-methyl modified nucleotide
  modified_base 13: mod_base = OTHER; note = 2'-O-methyl modified nucleotide
  modified_base 14: mod_base = OTHER; note = 2'-O-methyl modified nucleotide
  modified_base 15: mod_base = OTHER; note = 2'-O-methyl modified nucleotide
  modified_base 16: mod_base = OTHER; note = 2'-O-methyl modified nucleotide
  modified_base 17: mod_base = OTHER; note = 2'-O-methyl modified nucleotide
  modified_base 18: mod_base = OTHER; note = 2'-O-methyl modified nucleotide
  modified_base 19: mod_base = OTHER; note = 2'-O-methyl modified nucleotide
cctgaactaatcaatataa

SEQ ID NO: 101 - RNA, 19 nt, synthetic construct
  source 1..19: mol_type = other RNA
  modified_base 1: mod_base = OTHER; note = 2'-O-methyl modified nucleotide with phosphorothioate linkage
  modified_base 2: mod_base = OTHER; note = 2'-O-methyl modified nucleotide with phosphorothioate linkage
  modified_base 3: mod_base = OTHER; note = 2'-O-methyl modified nucleotide
  modified_base 4: mod_base = OTHER; note = 2'-O-methyl modified nucleotide
  modified_base 5: mod_base = OTHER; note = 2'-fluoro modified nucleotide
  modified_base 6: mod_base = OTHER; note = 2'-O-methyl modified nucleotide
  modified_base 7: mod_base = OTHER; note = 2'-fluoro modified nucleotide
  modified_base 8: mod_base = OTHER; note = 2'-fluoro modified nucleotide
  modified_base 9: mod_base = OTHER; note = 2'-fluoro modified nucleotide
  modified_base 10: mod_base = OTHER; note = 2'-O-methyl modified nucleotide
  modified_base 11: mod_base = OTHER; note = 2'-O-methyl modified nucleotide
  modified_base 12: mod_base = OTHER; note = 2'-O-methyl modified nucleotide
  modified_base 13: mod_base = OTHER; note = 2'-O-methyl modified nucleotide
  modified_base 14: mod_base = OTHER; note = 2'-O-methyl modified nucleotide
  modified_base 15: mod_base = OTHER; note = 2'-O-methyl modified nucleotide
  modified_base 16: mod_base = OTHER; note = 2'-O-methyl modified nucleotide
  modified_base 17: mod_base = OTHER; note = 2'-O-methyl modified nucleotide
  modified_base 18: mod_base = OTHER; note = 2'-O-methyl modified nucleotide
  modified_base 19: mod_base = OTHER; note = 2'-O-methyl modified nucleotide
tgaactaatcaatatataa

SEQ ID NO: 102 - RNA, 19 nt, synthetic construct
  source 1..19: mol_type = other RNA
  modified_base 1: mod_base = OTHER; note = 2'-O-methyl modified nucleotide with phosphorothioate linkage
  modified_base 2: mod_base = OTHER; note = 2'-O-methyl modified nucleotide with phosphorothioate linkage
  modified_base 3: mod_base = OTHER; note = 2'-O-methyl modified nucleotide
  modified_base 4: mod_base = OTHER; note = 2'-O-methyl modified nucleotide
  modified_base 5: mod_base = OTHER; note = 2'-fluoro modified nucleotide
  modified_base 6: mod_base = OTHER; note = 2'-O-methyl modified nucleotide
  modified_base 7: mod_base = OTHER; note = 2'-fluoro modified nucleotide
  modified_base 8: mod_base = OTHER; note = 2'-fluoro modified nucleotide
  modified_base 9: mod_base = OTHER; note = 2'-fluoro modified nucleotide
  modified_base 10: mod_base = OTHER; note = 2'-O-methyl modified nucleotide
  modified_base 11: mod_base = OTHER; note = 2'-O-methyl modified nucleotide
  modified_base 12: mod_base = OTHER; note = 2'-O-methyl modified nucleotide
  modified_base 13: mod_base = OTHER; note = 2'-O-methyl modified nucleotide
  modified_base 14: mod_base = OTHER; note = 2'-O-methyl modified nucleotide
  modified_base 15: mod_base = OTHER; note = 2'-O-methyl modified nucleotide
  modified_base 16: mod_base = OTHER; note = 2'-O-methyl modified nucleotide
  modified_base 17: mod_base = OTHER; note = 2'-O-methyl modified nucleotide
  modified_base 18: mod_base = OTHER; note = 2'-O-methyl modified nucleotide
  modified_base 19: mod_base = OTHER; note = 2'-O-methyl modified nucleotide
tggttctcattccttgcaa

SEQ ID NO: 103 - RNA, 19 nt, synthetic construct
  source 1..19: mol_type = other RNA
  modified_base 1: mod_base = OTHER; note = 2'-O-methyl modified nucleotide with phosphorothioate linkage
  modified_base 2: mod_base = OTHER; note = 2'-O-methyl modified nucleotide with phosphorothioate linkage
  modified_base 3: mod_base = OTHER; note = 2'-O-methyl modified nucleotide
  modified_base 4: mod_base = OTHER; note = 2'-O-methyl modified nucleotide
  modified_base 5: mod_base = OTHER; note = 2'-fluoro modified nucleotide
  modified_base 6: mod_base = OTHER; note = 2'-O-methyl modified nucleotide
  modified_base 7: mod_base = OTHER; note = 2'-fluoro modified nucleotide
  modified_base 8: mod_base = OTHER; note = 2'-fluoro modified nucleotide
  modified_base 9: mod_base = OTHER; note = 2'-fluoro modified nucleotide
  modified_base 10: mod_base = OTHER; note = 2'-O-methyl modified nucleotide
  modified_base 11: mod_base = OTHER; note = 2'-O-methyl modified nucleotide
  modified_base 12: mod_base = OTHER; note = 2'-O-methyl modified nucleotide
  modified_base 13: mod_base = OTHER; note = 2'-O-methyl modified nucleotide
  modified_base 14: mod_base = OTHER; note = 2'-O-methyl modified nucleotide
  modified_base 15: mod_base = OTHER; note = 2'-O-methyl modified nucleotide
  modified_base 16: mod_base = OTHER; note = 2'-O-methyl modified nucleotide
  modified_base 17: mod_base = OTHER; note = 2'-O-methyl modified nucleotide
  modified_base 18: mod_base = OTHER; note = 2'-O-methyl modified nucleotide
  modified_base 19: mod_base = OTHER; note = 2'-O-methyl modified nucleotide
ctcattccttgcaccataa

SEQ ID NO: 104 - RNA, 19 nt, synthetic construct
  source 1..19: mol_type = other RNA
  modified_base 1: mod_base = OTHER; note = 2'-O-methyl modified nucleotide with phosphorothioate linkage
  modified_base 2: mod_base = OTHER; note = 2'-O-methyl modified nucleotide with phosphorothioate linkage
  modified_base 3: mod_base = OTHER; note = 2'-O-methyl modified nucleotide
  modified_base 4: mod_base = OTHER; note = 2'-O-methyl modified nucleotide
  modified_base 5: mod_base = OTHER; note = 2'-fluoro modified nucleotide
  modified_base 6: mod_base = OTHER; note = 2'-O-methyl modified nucleotide
  modified_base 7: mod_base = OTHER; note = 2'-fluoro modified nucleotide
  modified_base 8: mod_base = OTHER; note = 2'-fluoro modified nucleotide
  modified_base 9: mod_base = OTHER; note = 2'-fluoro modified nucleotide
  modified_base 10: mod_base = OTHER; note = 2'-O-methyl modified nucleotide
  modified_base 11: mod_base = OTHER; note = 2'-O-methyl modified nucleotide
  modified_base 12: mod_base = OTHER; note = 2'-O-methyl modified nucleotide
  modified_base 13: mod_base = OTHER; note = 2'-O-methyl modified nucleotide
  modified_base 14: mod_base = OTHER; note = 2'-O-methyl modified nucleotide
  modified_base 15: mod_base = OTHER; note = 2'-O-methyl modified nucleotide
  modified_base 16: mod_base = OTHER; note = 2'-O-methyl modified nucleotide
  modified_base 17: mod_base = OTHER; note = 2'-O-methyl modified nucleotide
  modified_base 18: mod_base = OTHER; note = 2'-O-methyl modified nucleotide
  modified_base 19: mod_base = OTHER; note = 2'-O-methyl modified nucleotide
ttggctttctgctgggtta

SEQ ID NO: 105 - RNA, 19 nt, synthetic construct
  source 1..19: mol_type = other RNA
  modified_base 1: mod_base = OTHER; note = 2'-O-methyl modified nucleotide with phosphorothioate linkage
  modified_base 2: mod_base = OTHER; note = 2'-O-methyl modified nucleotide with phosphorothioate linkage
  modified_base 3: mod_base = OTHER; note = 2'-O-methyl modified nucleotide
  modified_base 4: mod_base = OTHER; note = 2'-O-methyl modified nucleotide
  modified_base 5: mod_base = OTHER; note = 2'-fluoro modified nucleotide
  modified_base 6: mod_base = OTHER; note = 2'-O-methyl modified nucleotide
  modified_base 7: mod_base = OTHER; note = 2'-fluoro modified nucleotide
  modified_base 8: mod_base = OTHER; note = 2'-fluoro modified nucleotide
  modified_base 9: mod_base = OTHER; note = 2'-fluoro modified nucleotide
  modified_base 10: mod_base = OTHER; note = 2'-O-methyl modified nucleotide
  modified_base 11: mod_base = OTHER; note = 2'-O-methyl modified nucleotide
  modified_base 12: mod_base = OTHER; note = 2'-O-methyl modified nucleotide
  modified_base 13: mod_base = OTHER; note = 2'-O-methyl modified nucleotide
  modified_base 14: mod_base = OTHER; note = 2'-O-methyl modified nucleotide
  modified_base 15: mod_base = OTHER; note = 2'-O-methyl modified nucleotide
  modified_base 16: mod_base = OTHER; note = 2'-O-methyl modified nucleotide
  modified_base 17: mod_base = OTHER; note = 2'-O-methyl modified nucleotide
  modified_base 18: mod_base = OTHER; note = 2'-O-methyl modified nucleotide
  modified_base 19: mod_base = OTHER; note = 2'-O-methyl modified nucleotide
tcctctacatgattttcca

SEQ ID NO: 106 - RNA, 19 nt, synthetic construct
  source 1..19: mol_type = other RNA
  modified_base 1: mod_base = OTHER; note = 2'-O-methyl modified nucleotide with phosphorothioate linkage
  modified_base 2: mod_base = OTHER; note = 2'-O-methyl modified nucleotide with phosphorothioate linkage
  modified_base 3: mod_base = OTHER; note = 2'-O-methyl modified nucleotide
  modified_base 4: mod_base = OTHER; note = 2'-O-methyl modified nucleotide
  modified_base 5: mod_base = OTHER; note = 2'-fluoro modified nucleotide
  modified_base 6: mod_base = OTHER; note = 2'-O-methyl modified nucleotide
  modified_base 7: mod_base = OTHER; note = 2'-fluoro modified nucleotide
  modified_base 8: mod_base = OTHER; note = 2'-fluoro modified nucleotide
  modified_base 9: mod_base = OTHER; note = 2'-fluoro modified nucleotide
  modified_base 10: mod_base = OTHER; note = 2'-O-methyl modified nucleotide
  modified_base 11: mod_base = OTHER; note = 2'-O-methyl modified nucleotide
  modified_base 12: mod_base = OTHER; note = 2'-O-methyl modified nucleotide
  modified_base 13: mod_base = OTHER; note = 2'-O-methyl modified nucleotide
  modified_base 14: mod_base = OTHER; note = 2'-fluoro modified nucleotide
  modified_base 15: mod_base = OTHER; note = 2'-O-methyl modified nucleotide
  modified_base 16: mod_base = OTHER; note = 2'-O-methyl modified nucleotide
  modified_base 17: mod_base = OTHER; note = 2'-fluoro modified nucleotide
  modified_base 18: mod_base = OTHER; note = 2'-O-methyl modified nucleotide
  modified_base 19: mod_base = OTHER; note = 2'-O-methyl modified nucleotide
agatcaaggctcacttata

SEQ ID NO: 107 - RNA, 19 nt, synthetic construct
  source 1..19: mol_type = other RNA
  modified_base 1: mod_base = OTHER; note = 2'-O-methyl modified nucleotide with phosphorothioate linkage
  modified_base 2: mod_base = OTHER; note = 2'-O-methyl modified nucleotide with phosphorothioate linkage
  modified_base 3: mod_base = OTHER; note = 2'-O-methyl modified nucleotide
  modified_base 4: mod_base = OTHER; note = 2'-O-methyl modified nucleotide
  modified_base 5: mod_base = OTHER; note = 2'-fluoro modified nucleotide
  modified_base 6: mod_base = OTHER; note = 2'-O-methyl modified nucleotide
  modified_base 7: mod_base = OTHER; note = 2'-fluoro modified nucleotide
  modified_base 8: mod_base = OTHER; note = 2'-fluoro modified nucleotide
  modified_base 9: mod_base = OTHER; note = 2'-fluoro modified nucleotide
  modified_base 10: mod_base = OTHER; note = 2'-O-methyl modified nucleotide
  modified_base 11: mod_base = OTHER; note = 2'-O-methyl modified nucleotide
  modified_base 12: mod_base = OTHER; note = 2'-O-methyl modified nucleotide
  modified_base 13: mod_base = OTHER; note = 2'-O-methyl modified nucleotide
  modified_base 14: mod_base = OTHER; note = 2'-fluoro modified nucleotide
  modified_base 15: mod_base = OTHER; note = 2'-O-methyl modified nucleotide
  modified_base 16: mod_base = OTHER; note = 2'-O-methyl modified nucleotide
  modified_base 17: mod_base = OTHER; note = 2'-fluoro modified nucleotide
  modified_base 18: mod_base = OTHER; note = 2'-O-methyl modified nucleotide
  modified_base 19: mod_base = OTHER; note = 2'-O-methyl modified nucleotide
tcagcattgtgatgaccaa

SEQ ID NO: 108 - RNA, 19 nt, synthetic construct
  source 1..19: mol_type = other RNA
  modified_base 1: mod_base = OTHER; note = 2'-O-methyl modified nucleotide with phosphorothioate linkage
  modified_base 2: mod_base = OTHER; note = 2'-O-methyl modified nucleotide with phosphorothioate linkage
  modified_base 3: mod_base = OTHER; note = 2'-O-methyl modified nucleotide
  modified_base 4: mod_base = OTHER; note = 2'-O-methyl modified nucleotide
  modified_base 5: mod_base = OTHER; note = 2'-fluoro modified nucleotide
  modified_base 6: mod_base = OTHER; note = 2'-O-methyl modified nucleotide
  modified_base 7: mod_base = OTHER; note = 2'-fluoro modified nucleotide
  modified_base 8: mod_base = OTHER; note = 2'-fluoro modified nucleotide
  modified_base 9: mod_base = OTHER; note = 2'-fluoro modified nucleotide
  modified_base 10: mod_base = OTHER; note = 2'-O-methyl modified nucleotide
  modified_base 11: mod_base = OTHER; note = 2'-O-methyl modified nucleotide
  modified_base 12: mod_base = OTHER; note = 2'-O-methyl modified nucleotide
  modified_base 13: mod_base = OTHER; note = 2'-O-methyl modified nucleotide
  modified_base 14: mod_base = OTHER; note = 2'-fluoro modified nucleotide
  modified_base 15: mod_base = OTHER; note = 2'-O-methyl modified nucleotide
  modified_base 16: mod_base = OTHER; note = 2'-O-methyl modified nucleotide
  modified_base 17: mod_base = OTHER; note = 2'-fluoro modified nucleotide
  modified_base 18: mod_base = OTHER; note = 2'-O-methyl modified nucleotide
  modified_base 19: mod_base = OTHER; note = 2'-O-methyl modified nucleotide
tcatcattctcttgtgcaa

SEQ ID NO: 109 - RNA, 19 nt, synthetic construct
  source 1..19: mol_type = other RNA
  modified_base 1: mod_base = OTHER; note = 2'-O-methyl modified nucleotide with phosphorothioate linkage
  modified_base 2: mod_base = OTHER; note = 2'-O-methyl modified nucleotide with phosphorothioate linkage
  modified_base 3: mod_base = OTHER; note = 2'-O-methyl modified nucleotide
  modified_base 4: mod_base = OTHER; note = 2'-O-methyl modified nucleotide
  modified_base 5: mod_base = OTHER; note = 2'-fluoro modified nucleotide
  modified_base 6: mod_base = OTHER; note = 2'-O-methyl modified nucleotide
  modified_base 7: mod_base = OTHER; note = 2'-fluoro modified nucleotide
  modified_base 8: mod_base = OTHER; note = 2'-fluoro modified nucleotide
  modified_base 9: mod_base = OTHER; note = 2'-fluoro modified nucleotide
  modified_base 10: mod_base = OTHER; note = 2'-O-methyl modified nucleotide
  modified_base 11: mod_base = OTHER; note = 2'-O-methyl modified nucleotide
  modified_base 12: mod_base = OTHER; note = 2'-O-methyl modified nucleotide
  modified_base 13: mod_base = OTHER; note = 2'-O-methyl modified nucleotide
  modified_base 14: mod_base = OTHER; note = 2'-fluoro modified nucleotide
  modified_base 15: mod_base = OTHER; note = 2'-O-methyl modified nucleotide
  modified_base 16: mod_base = OTHER; note = 2'-O-methyl modified nucleotide
  modified_base 17: mod_base = OTHER; note = 2'-fluoro modified nucleotide
  modified_base 18: mod_base = OTHER; note = 2'-O-methyl modified nucleotide
  modified_base 19: mod_base = OTHER; note = 2'-O-methyl modified nucleotide
tggccgtcacagttctcta

SEQ ID NO: 110 - RNA, 19 nt, synthetic construct
  source 1..19: mol_type = other RNA
  modified_base 1: mod_base = OTHER; note = 2'-O-methyl modified nucleotide with phosphorothioate linkage
  modified_base 2: mod_base = OTHER; note = 2'-O-methyl modified nucleotide with phosphorothioate linkage
  modified_base 3: mod_base = OTHER; note = 2'-O-methyl modified nucleotide
  modified_base 4: mod_base = OTHER; note = 2'-O-methyl modified nucleotide
  modified_base 5: mod_base = OTHER; note = 2'-fluoro modified nucleotide
  modified_base 6: mod_base = OTHER; note = 2'-O-methyl modified nucleotide
  modified_base 7: mod_base = OTHER; note = 2'-fluoro modified nucleotide
  modified_base 8: mod_base = OTHER; note = 2'-fluoro modified nucleotide
  modified_base 9: mod_base = OTHER; note = 2'-fluoro modified nucleotide
  modified_base 10: mod_base = OTHER; note = 2'-O-methyl modified nucleotide
  modified_base 11: mod_base = OTHER; note = 2'-O-methyl modified nucleotide
  modified_base 12: mod_base = OTHER; note = 2'-O-methyl modified nucleotide
  modified_base 13: mod_base = OTHER; note = 2'-O-methyl modified nucleotide
  modified_base 14: mod_base = OTHER; note = 2'-fluoro modified nucleotide
  modified_base 15: mod_base = OTHER; note = 2'-O-methyl modified nucleotide
  modified_base 16: mod_base = OTHER; note = 2'-O-methyl modified nucleotide
  modified_base 17: mod_base = OTHER; note = 2'-fluoro modified nucleotide
  modified_base 18: mod_base = OTHER; note = 2'-O-methyl modified nucleotide
  modified_base 19: mod_base = OTHER; note = 2'-O-methyl modified nucleotide
tggtcccaaagcaattcta

SEQ ID NO: 111 - RNA, 19 nt, synthetic construct
  source 1..19: mol_type = other RNA
  modified_base 1: mod_base = OTHER; note = 2'-O-methyl modified nucleotide with phosphorothioate linkage
  modified_base 2: mod_base = OTHER; note = 2'-O-methyl modified nucleotide with phosphorothioate linkage
  modified_base 3: mod_base = OTHER; note = 2'-O-methyl modified nucleotide
  modified_base 4: mod_base = OTHER; note = 2'-O-methyl modified nucleotide
  modified_base 5: mod_base = OTHER; note = 2'-fluoro modified nucleotide
  modified_base 6: mod_base = OTHER; note = 2'-O-methyl modified nucleotide
  modified_base 7: mod_base = OTHER; note = 2'-fluoro modified nucleotide
  modified_base 8: mod_base = OTHER; note = 2'-fluoro modified nucleotide
  modified_base 9: mod_base = OTHER; note = 2'-fluoro modified nucleotide
  modified_base 10: mod_base = OTHER; note = 2'-O-methyl modified nucleotide
  modified_base 11: mod_base = OTHER; note = 2'-O-methyl modified nucleotide
  modified_base 12: mod_base = OTHER; note = 2'-O-methyl modified nucleotide
  modified_base 13: mod_base = OTHER; note = 2'-O-methyl modified nucleotide
  modified_base 14: mod_base = OTHER; note = 2'-fluoro modified nucleotide
  modified_base 15: mod_base = OTHER; note = 2'-O-methyl modified nucleotide
  modified_base 16: mod_base = OTHER; note = 2'-O-methyl modified nucleotide
  modified_base 17: mod_base = OTHER; note = 2'-fluoro modified nucleotide
  modified_base 18: mod_base = OTHER; note = 2'-O-methyl modified nucleotide
  modified_base 19: mod_base = OTHER; note = 2'-O-methyl modified nucleotide
tccagtacatctatcagaa

SEQ ID NO: 112 - RNA, 19 nt, synthetic construct
  source 1..19: mol_type = other RNA
  modified_base 1: mod_base = OTHER; note = 2'-O-methyl modified nucleotide with phosphorothioate linkage
  modified_base 2: mod_base = OTHER; note = 2'-O-methyl modified nucleotide with phosphorothioate linkage
  modified_base 3: mod_base = OTHER; note = 2'-O-methyl modified nucleotide
  modified_base 4: mod_base = OTHER; note = 2'-O-methyl modified nucleotide
  modified_base 5: mod_base = OTHER; note = 2'-fluoro modified nucleotide
  modified_base 6: mod_base = OTHER; note = 2'-O-methyl modified nucleotide
  modified_base 7: mod_base = OTHER; note = 2'-fluoro modified nucleotide
  modified_base 8: mod_base = OTHER; note = 2'-fluoro modified nucleotide
  modified_base 9: mod_base = OTHER; note = 2'-fluoro modified nucleotide
  modified_base 10: mod_base = OTHER; note = 2'-O-methyl modified nucleotide
  modified_base 11: mod_base = OTHER; note = 2'-O-methyl modified nucleotide
  modified_base 12: mod_base = OTHER; note = 2'-O-methyl modified nucleotide
  modified_base 13: mod_base = OTHER; note = 2'-O-methyl modified nucleotide
  modified_base 14: mod_base = OTHER; note = 2'-fluoro modified nucleotide
  modified_base 15: mod_base = OTHER; note = 2'-O-methyl modified nucleotide
  modified_base 16: mod_base = OTHER; note = 2'-O-methyl modified nucleotide
  modified_base 17: mod_base = OTHER; note = 2'-fluoro modified nucleotide
  modified_base 18: mod_base = OTHER; note = 2'-O-methyl modified nucleotide
  modified_base 19: mod_base = OTHER; note = 2'-O-methyl modified nucleotide
ccagtacatctatcagaaa

SEQ ID NO: 113 - RNA, 19 nt, synthetic construct
  source 1..19: mol_type = other RNA
  modified_base 1: mod_base = OTHER; note = 2'-O-methyl modified nucleotide with phosphorothioate linkage
  modified_base 2: mod_base = OTHER; note = 2'-O-methyl modified nucleotide with phosphorothioate linkage
  modified_base 3: mod_base = OTHER; note = 2'-O-methyl modified nucleotide
  modified_base 4: mod_base = OTHER; note = 2'-O-methyl modified nucleotide
  modified_base 5: mod_base = OTHER; note = 2'-fluoro modified nucleotide
  modified_base 6: mod_base = OTHER; note = 2'-O-methyl modified nucleotide
  modified_base 7: mod_base = OTHER; note = 2'-fluoro modified nucleotide
  modified_base 8: mod_base = OTHER; note = 2'-fluoro modified nucleotide
  modified_base 9: mod_base = OTHER; note = 2'-fluoro modified nucleotide
  modified_base 10: mod_base = OTHER; note = 2'-O-methyl modified nucleotide
  modified_base 11: mod_base = OTHER; note = 2'-O-methyl modified nucleotide
  modified_base 12: mod_base = OTHER; note = 2'-O-methyl modified nucleotide
  modified_base 13: mod_base = OTHER; note = 2'-O-methyl modified nucleotide
  modified_base 14: mod_base = OTHER; note = 2'-fluoro modified nucleotide
  modified_base 15: mod_base = OTHER; note = 2'-O-methyl modified nucleotide
  modified_base 16: mod_base = OTHER; note = 2'-O-methyl modified nucleotide
  modified_base 17: mod_base = OTHER; note = 2'-fluoro modified nucleotide
  modified_base 18: mod_base = OTHER; note = 2'-O-methyl modified nucleotide
  modified_base 19: mod_base = OTHER; note = 2'-O-methyl modified nucleotide
atctatcagaatcatcaaa

SEQ ID NO: 114 - RNA, 19 nt, synthetic construct
  source 1..19: mol_type = other RNA
  modified_base 1: mod_base = OTHER; note = 2'-O-methyl modified nucleotide with phosphorothioate linkage
  modified_base 2: mod_base = OTHER; note = 2'-O-methyl modified nucleotide with phosphorothioate linkage
  modified_base 3: mod_base = OTHER; note = 2'-O-methyl modified nucleotide
  modified_base 4: mod_base = OTHER; note = 2'-O-methyl modified nucleotide
  modified_base 5: mod_base = OTHER; note = 2'-fluoro modified nucleotide
  modified_base 6: mod_base = OTHER; note = 2'-O-methyl modified nucleotide
  modified_base 7: mod_base = OTHER; note = 2'-fluoro modified nucleotide
  modified_base 8: mod_base = OTHER; note = 2'-fluoro modified nucleotide
  modified_base 9: mod_base = OTHER; note = 2'-fluoro modified nucleotide
  modified_base 10: mod_base = OTHER; note = 2'-O-methyl modified nucleotide
  modified_base 11: mod_base = OTHER; note = 2'-O-methyl modified nucleotide
  modified_base 12: mod_base = OTHER; note = 2'-O-methyl modified nucleotide
  modified_base 13: mod_base = OTHER; note = 2'-O-methyl modified nucleotide
  modified_base 14: mod_base = OTHER; note = 2'-fluoro modified nucleotide
  modified_base 15: mod_base = OTHER; note = 2'-O-methyl modified nucleotide
  modified_base 16: mod_base = OTHER; note = 2'-O-methyl modified nucleotide
  modified_base 17: mod_base = OTHER; note = 2'-fluoro modified nucleotide
  modified_base 18: mod_base = OTHER; note = 2'-O-methyl modified nucleotide
  modified_base 19: mod_base = OTHER; note = 2'-O-methyl modified nucleotide
aagtcactcaattcctgaa

SEQ ID NO: 115 - RNA, 19 nt, synthetic construct
  source 1..19: mol_type = other RNA
  modified_base 1: mod_base = OTHER; note = 2'-O-methyl modified nucleotide with phosphorothioate linkage
  modified_base 2: mod_base = OTHER; note = 2'-O-methyl modified nucleotide with phosphorothioate linkage
  modified_base 3: mod_base = OTHER; note = 2'-O-methyl modified nucleotide
  modified_base 4: mod_base = OTHER; note = 2'-O-methyl modified nucleotide
  modified_base 5: mod_base = OTHER; note = 2'-fluoro modified nucleotide
  modified_base 6: mod_base = OTHER; note = 2'-O-methyl modified nucleotide
  modified_base 7: mod_base = OTHER; note = 2'-fluoro modified nucleotide
  modified_base 8: mod_base = OTHER; note = 2'-fluoro modified nucleotide
  modified_base 9: mod_base = OTHER; note = 2'-fluoro modified nucleotide
  modified_base 10: mod_base = OTHER; note = 2'-O-methyl modified nucleotide
  modified_base 11: mod_base = OTHER; note = 2'-O-methyl modified nucleotide
  modified_base 12: mod_base = OTHER; note = 2'-O-methyl modified nucleotide
  modified_base 13: mod_base = OTHER; note = 2'-O-methyl modified nucleotide
  modified_base 14: mod_base = OTHER; note = 2'-fluoro modified nucleotide
  modified_base 15: mod_base = OTHER; note = 2'-O-methyl modified nucleotide
  modified_base 16: mod_base = OTHER; note = 2'-O-methyl modified nucleotide
  modified_base 17: mod_base = OTHER; note = 2'-fluoro modified nucleotide
  modified_base 18: mod_base = OTHER; note = 2'-O-methyl modified nucleotide
  modified_base 19: mod_base = OTHER; note = 2'-O-methyl modified nucleotide
cctgaactaatcaatataa

SEQ ID NO: 116 - RNA, 19 nt, synthetic construct
  source 1..19: mol_type = other RNA
  modified_base 1: mod_base = OTHER; note = 2'-O-methyl modified nucleotide with phosphorothioate linkage
  modified_base 2: mod_base = OTHER; note = 2'-O-methyl modified nucleotide with phosphorothioate linkage
  modified_base 3: mod_base = OTHER; note = 2'-O-methyl modified nucleotide
  modified_base 4: mod_base = OTHER; note = 2'-O-methyl modified nucleotide
  modified_base 5: mod_base = OTHER; note = 2'-fluoro modified nucleotide
  modified_base 6: mod_base = OTHER; note = 2'-O-methyl modified nucleotide
  modified_base 7: mod_base = OTHER; note = 2'-fluoro modified nucleotide
  modified_base 8: mod_base = OTHER; note = 2'-fluoro modified nucleotide
  modified_base 9: mod_base = OTHER; note = 2'-fluoro modified nucleotide
  modified_base 10: mod_base = OTHER; note = 2'-O-methyl modified nucleotide
  modified_base 11: mod_base = OTHER; note = 2'-O-methyl modified nucleotide
  modified_base 12: mod_base = OTHER; note = 2'-O-methyl modified nucleotide
  modified_base 13: mod_base = OTHER; note = 2'-O-methyl modified nucleotide
  modified_base 14: mod_base = OTHER; note = 2'-fluoro modified nucleotide
  modified_base 15: mod_base = OTHER; note = 2'-O-methyl modified nucleotide
  modified_base 16: mod_base = OTHER; note = 2'-O-methyl modified nucleotide
  modified_base 17: mod_base = OTHER; note = 2'-fluoro modified nucleotide
  modified_base 18: mod_base = OTHER; note = 2'-O-methyl modified nucleotide
  modified_base 19: mod_base = OTHER; note = 2'-O-methyl modified nucleotide
tgaactaatcaatatataa

SEQ ID NO: 117 - RNA, 19 nt, synthetic construct
  source 1..19: mol_type = other RNA
  modified_base 1: mod_base = OTHER; note = 2'-O-methyl modified nucleotide with phosphorothioate linkage
  modified_base 2: mod_base = OTHER; note = 2'-O-methyl modified nucleotide with phosphorothioate linkage
  modified_base 3: mod_base = OTHER; note = 2'-O-methyl modified nucleotide
  modified_base 4: mod_base = OTHER; note = 2'-O-methyl modified nucleotide
  modified_base 5: mod_base = OTHER; note = 2'-fluoro modified nucleotide
  modified_base 6: mod_base = OTHER; note = 2'-O-methyl modified nucleotide
  modified_base 7: mod_base = OTHER; note = 2'-fluoro modified nucleotide
  modified_base 8: mod_base = OTHER; note = 2'-fluoro modified nucleotide
  modified_base 9: mod_base = OTHER; note = 2'-fluoro modified nucleotide
  modified_base 10: mod_base = OTHER; note = 2'-O-methyl modified nucleotide
  modified_base 11: mod_base = OTHER; note = 2'-O-methyl modified nucleotide
  modified_base 12: mod_base = OTHER; note = 2'-O-methyl modified nucleotide
  modified_base 13: mod_base = OTHER; note = 2'-O-methyl modified nucleotide
  modified_base 14: mod_base = OTHER; note = 2'-fluoro modified nucleotide
  modified_base 15: mod_base = OTHER; note = 2'-O-methyl modified nucleotide
  modified_base 16: mod_base = OTHER; note = 2'-O-methyl modified nucleotide
  modified_base 17: mod_base = OTHER; note = 2'-fluoro modified nucleotide
  modified_base 18: mod_base = OTHER; note = 2'-O-methyl modified nucleotide
  modified_base 19: mod_base = OTHER; note = 2'-O-methyl modified nucleotide
tggttctcattccttgcaa

SEQ ID NO: 118 - RNA, 19 nt, synthetic construct
  source 1..19: mol_type = other RNA
  modified_base 1: mod_base = OTHER; note = 2'-O-methyl modified nucleotide with phosphorothioate linkage
  modified_base 2: mod_base = OTHER; note = 2'-O-methyl modified nucleotide with phosphorothioate linkage
  modified_base 3: mod_base = OTHER; note = 2'-O-methyl modified nucleotide
  modified_base 4: mod_base = OTHER; note = 2'-O-methyl modified nucleotide
  modified_base 5: mod_base = OTHER; note = 2'-fluoro modified nucleotide
  modified_base 6: mod_base = OTHER; note = 2'-O-methyl modified nucleotide
  modified_base 7: mod_base = OTHER; note = 2'-fluoro modified nucleotide
  modified_base 8: mod_base = OTHER; note = 2'-fluoro modified nucleotide
  modified_base 9: mod_base = OTHER; note = 2'-fluoro modified nucleotide
  modified_base 10: mod_base = OTHER; note = 2'-O-methyl modified nucleotide
  modified_base 11: mod_base = OTHER; note = 2'-O-methyl modified nucleotide
  modified_base 12: mod_base = OTHER; note = 2'-O-methyl modified nucleotide
  modified_base 13: mod_base = OTHER; note = 2'-O-methyl modified nucleotide
  modified_base 14: mod_base = OTHER; note = 2'-fluoro modified nucleotide
  modified_base 15: mod_base = OTHER; note = 2'-O-methyl modified nucleotide
  modified_base 16: mod_base = OTHER; note = 2'-O-methyl modified nucleotide
  modified_base 17: mod_base = OTHER; note = 2'-fluoro modified nucleotide
  modified_base 18: mod_base = OTHER; note = 2'-O-methyl modified nucleotide
  modified_base 19: mod_base = OTHER; note = 2'-O-methyl modified nucleotide
ctcattccttgcaccataa

SEQ ID NO: 119 - RNA, 19 nt, synthetic construct
  source 1..19: mol_type = other RNA
  modified_base 1: mod_base = OTHER; note = 2'-O-methyl modified nucleotide with phosphorothioate linkage
  modified_base 2: mod_base = OTHER; note = 2'-O-methyl modified nucleotide with phosphorothioate linkage
  modified_base 3: mod_base = OTHER; note = 2'-O-methyl modified nucleotide
  modified_base 4: mod_base = OTHER; note = 2'-O-methyl modified nucleotide
  modified_base 5: mod_base = OTHER; note = 2'-fluoro modified nucleotide
  modified_base 6: mod_base = OTHER; note = 2'-O-methyl modified nucleotide
  modified_base 7: mod_base = OTHER; note = 2'-fluoro modified nucleotide
  modified_base 8: mod_base = OTHER; note = 2'-fluoro modified nucleotide
  modified_base 9: mod_base = OTHER; note = 2'-fluoro modified nucleotide
  modified_base 10: mod_base = OTHER; note = 2'-O-methyl modified nucleotide
  modified_base 11: mod_base = OTHER; note = 2'-O-methyl modified nucleotide
  modified_base 12: mod_base = OTHER; note = 2'-O-methyl modified nucleotide
  modified_base 13: mod_base = OTHER; note = 2'-O-methyl modified nucleotide
  modified_base 14: mod_base = OTHER; note = 2'-fluoro modified nucleotide
  modified_base 15: mod_base = OTHER; note = 2'-O-methyl modified nucleotide
  modified_base 16: mod_base = OTHER; note = 2'-O-methyl modified nucleotide
  modified_base 17: mod_base = OTHER; note = 2'-fluoro modified nucleotide
  modified_base 18: mod_base = OTHER; note = 2'-O-methyl modified nucleotide
  modified_base 19: mod_base = OTHER; note = 2'-O-methyl modified nucleotide
ttggctttctgctgggtta

SEQ ID NO: 120 - RNA, 19 nt, synthetic construct
  source 1..19: mol_type = other RNA
  modified_base 1: mod_base = OTHER; note = 2'-O-methyl modified nucleotide with phosphorothioate linkage
  modified_base 2: mod_base = OTHER; note = 2'-O-methyl modified nucleotide with phosphorothioate linkage
  modified_base 3: mod_base = OTHER; note = 2'-O-methyl modified nucleotide
  modified_base 4: mod_base = OTHER; note = 2'-O-methyl modified nucleotide
  modified_base 5: mod_base = OTHER; note = 2'-fluoro modified nucleotide
  modified_base 6: mod_base = OTHER; note = 2'-O-methyl modified nucleotide
  modified_base 7: mod_base = OTHER; note = 2'-fluoro modified nucleotide
  modified_base 8: mod_base = OTHER; note = 2'-fluoro modified nucleotide
  modified_base 9: mod_base = OTHER; note = 2'-fluoro modified nucleotide
  modified_base 10: mod_base = OTHER; note = 2'-O-methyl modified nucleotide
  modified_base 11: mod_base = OTHER; note = 2'-O-methyl modified nucleotide
  modified_base 12: mod_base = OTHER; note = 2'-O-methyl modified nucleotide
  modified_base 13: mod_base = OTHER; note = 2'-O-methyl modified nucleotide
  modified_base 14: mod_base = OTHER; note = 2'-fluoro modified nucleotide
  modified_base 15: mod_base = OTHER; note = 2'-O-methyl modified nucleotide
  modified_base 16: mod_base = OTHER; note = 2'-O-methyl modified nucleotide
  modified_base 17: mod_base = OTHER; note = 2'-fluoro modified nucleotide
  modified_base 18: mod_base = OTHER; note = 2'-O-methyl modified nucleotide
  modified_base 19: mod_base = OTHER; note = 2'-O-methyl modified nucleotide
tcctctacatgattttcca

SEQ ID NO: 121 - RNA, 19 nt, synthetic construct
  source 1..19: mol_type = other RNA
  modified_base 1: mod_base = OTHER; note = 2'-O-methyl modified nucleotide with phosphorothioate linkage
  modified_base 2: mod_base = OTHER; note = 2'-O-methyl modified nucleotide with phosphorothioate linkage
  modified_base 3: mod_base = OTHER; note = 2'-O-methyl modified nucleotide
  modified_base 4: mod_base = OTHER; note = 2'-O-methyl modified nucleotide
  modified_base 5: mod_base = OTHER; note = 2'-fluoro modified nucleotide
  modified_base 6: mod_base = OTHER; note = 2'-O-methyl modified nucleotide
  modified_base 7: mod_base = OTHER; note = 2'-fluoro modified nucleotide
  modified_base 8: mod_base = OTHER; note = 2'-fluoro modified nucleotide
  modified_base 9: mod_base = OTHER; note = 2'-fluoro modified nucleotide
  modified_base 10: mod_base = OTHER; note = 2'-O-methyl modified nucleotide
  modified_base 11: mod_base = OTHER; note = 2'-O-methyl modified nucleotide
  modified_base 12: mod_base = OTHER; note = 2'-O-methyl modified nucleotide
  modified_base 13: mod_base = OTHER; note = 2'-O-methyl modified nucleotide
  modified_base 14: mod_base = OTHER; note = 2'-O-methyl modified nucleotide
  modified_base 15: mod_base = OTHER; note = 2'-O-methyl modified nucleotide
  modified_base 16: mod_base = OTHER; note = 2'-O-methyl modified nucleotide
  modified_base 17: mod_base = OTHER; note = 2'-O-methyl modified nucleotide
  modified_base 18: mod_base = OTHER; note = 2'-O-methyl modified nucleotide
  modified_base 19: mod_base = OTHER; note = 2'-O-methyl modified nucleotide
agatcaaggctcacttata

SEQ ID NO: 122 - RNA, 19 nt, synthetic construct
  source 1..19: mol_type = other RNA
  modified_base 1: mod_base = OTHER; note = 2'-O-methyl modified nucleotide with phosphorothioate linkage
  modified_base 2: mod_base = OTHER; note = 2'-O-methyl modified nucleotide with phosphorothioate linkage
  modified_base 3: mod_base = OTHER; note = 2'-O-methyl modified nucleotide
  modified_base 4: mod_base = OTHER; note = 2'-O-methyl modified nucleotide
  modified_base 5: mod_base = OTHER; note = 2'-fluoro modified nucleotide
  modified_base 6: mod_base = OTHER; note = 2'-O-methyl modified nucleotide
  modified_base 7: mod_base = OTHER; note = 2'-fluoro modified nucleotide
  modified_base 8: mod_base = OTHER; note = 2'-fluoro modified nucleotide
  modified_base 9: mod_base = OTHER; note = 2'-fluoro modified nucleotide
  modified_base 10: mod_base = OTHER; note = 2'-O-methyl modified nucleotide
  modified_base 11: mod_base = OTHER; note = 2'-O-methyl modified nucleotide
  modified_base 12: mod_base = OTHER; note = 2'-O-methyl modified nucleotide
  modified_base 13: mod_base = OTHER; note = 2'-O-methyl modified nucleotide
  modified_base 14: mod_base = OTHER; note = 2'-O-methyl modified nucleotide
  modified_base 15: mod_base = OTHER; note = 2'-O-methyl modified nucleotide
  modified_base 16: mod_base = OTHER; note = 2'-O-methyl modified nucleotide
  modified_base 17: mod_base = OTHER; note = 2'-O-methyl modified nucleotide
  modified_base 18: mod_base = OTHER; note = 2'-O-methyl modified nucleotide
  modified_base 19: mod_base = OTHER; note = 2'-O-methyl modified nucleotide
tcagcattgtgatgaccaa

SEQ ID NO: 123 - RNA, 19 nt, synthetic construct
  source 1..19: mol_type = other RNA
  modified_base 1: mod_base = OTHER; note = 2'-O-methyl modified nucleotide with phosphorothioate linkage
  modified_base 2: mod_base = OTHER; note = 2'-O-methyl modified nucleotide with phosphorothioate linkage
  modified_base 3: mod_base = OTHER; note = 2'-O-methyl modified nucleotide
  modified_base 4: mod_base = OTHER; note = 2'-O-methyl modified nucleotide
  modified_base 5: mod_base = OTHER; note = 2'-fluoro modified nucleotide
  modified_base 6: mod_base = OTHER; note = 2'-O-methyl modified nucleotide
  modified_base 7: mod_base = OTHER; note = 2'-fluoro modified nucleotide
  modified_base 8: mod_base = OTHER; note = 2'-fluoro modified nucleotide
  modified_base 9: mod_base = OTHER; note = 2'-fluoro modified nucleotide
  modified_base 10: mod_base = OTHER; note = 2'-O-methyl modified nucleotide
  modified_base 11: mod_base = OTHER; note = 2'-O-methyl modified nucleotide
  modified_base 12: mod_base = OTHER; note = 2'-O-methyl modified nucleotide
  modified_base 13: mod_base = OTHER; note = 2'-O-methyl modified nucleotide
  modified_base 14: mod_base = OTHER; note = 2'-O-methyl modified nucleotide
  modified_base 15: mod_base = OTHER; note = 2'-O-methyl modified nucleotide
  modified_base 16: mod_base = OTHER; note = 2'-O-methyl modified nucleotide
  modified_base 17: mod_base = OTHER; note = 2'-O-methyl modified nucleotide
  modified_base 18: mod_base = OTHER; note = 2'-O-methyl modified nucleotide
  modified_base 19: mod_base = OTHER; note = 2'-O-methyl modified nucleotide
tcatcattctcttgtgcaa

SEQ ID NO: 124 - RNA, 19 nt, synthetic construct
  source 1..19: mol_type = other RNA
  modified_base 1: mod_base = OTHER; note = 2'-O-methyl modified nucleotide with phosphorothioate linkage
  modified_base 2: mod_base = OTHER; note = 2'-O-methyl modified nucleotide with phosphorothioate linkage
  modified_base 3: mod_base = OTHER; note = 2'-O-methyl modified nucleotide
  modified_base 4: mod_base = OTHER; note = 2'-O-methyl modified nucleotide
  modified_base 5: mod_base = OTHER; note = 2'-fluoro modified nucleotide
  modified_base 6: mod_base = OTHER; note = 2'-O-methyl modified nucleotide
  modified_base 7: mod_base = OTHER; note = 2'-fluoro modified nucleotide
  modified_base 8: mod_base = OTHER; note = 2'-fluoro modified nucleotide
  modified_base 9: mod_base = OTHER; note = 2'-fluoro modified nucleotide
  modified_base 10: mod_base = OTHER; note = 2'-O-methyl modified nucleotide
  modified_base 11: mod_base = OTHER; note = 2'-O-methyl modified nucleotide
  modified_base 12: mod_base = OTHER; note = 2'-O-methyl modified nucleotide
  modified_base 13: mod_base = OTHER; note = 2'-O-methyl modified nucleotide
  modified_base 14: mod_base = OTHER; note = 2'-O-methyl modified nucleotide
  modified_base 15: mod_base = OTHER; note = 2'-O-methyl modified nucleotide
  modified_base 16: mod_base = OTHER; note = 2'-O-methyl modified nucleotide
  modified_base 17: mod_base = OTHER; note = 2'-O-methyl modified nucleotide
  modified_base 18: mod_base = OTHER; note = 2'-O-methyl modified nucleotide
  modified_base 19: mod_base = OTHER; note = 2'-O-methyl modified nucleotide
tggccgtcacagttctcta

SEQ ID NO: 125 - RNA, 19 nt, synthetic construct
  source 1..19: mol_type = other RNA
  modified_base 1: mod_base = OTHER; note = 2'-O-methyl modified nucleotide with phosphorothioate linkage
  modified_base 2: mod_base = OTHER; note = 2'-O-methyl modified nucleotide with phosphorothioate linkage
  modified_base 3: mod_base = OTHER; note = 2'-O-methyl modified nucleotide
  modified_base 4: mod_base = OTHER; note = 2'-O-methyl modified nucleotide
  modified_base 5: mod_base = OTHER; note = 2'-fluoro modified nucleotide
  modified_base 6: mod_base = OTHER; note = 2'-O-methyl modified nucleotide
  modified_base 7: mod_base = OTHER; note = 2'-fluoro modified nucleotide
  modified_base 8: mod_base = OTHER; note = 2'-fluoro modified nucleotide
  modified_base 9: mod_base = OTHER; note = 2'-fluoro modified nucleotide
  modified_base 10: mod_base = OTHER; note = 2'-O-methyl modified nucleotide
  modified_base 11: mod_base = OTHER; note = 2'-O-methyl modified nucleotide
  modified_base 12: mod_base = OTHER; note = 2'-O-methyl modified nucleotide
  modified_base 13: mod_base = OTHER; note = 2'-O-methyl modified nucleotide
  modified_base 14: mod_base = OTHER; note = 2'-O-methyl modified nucleotide
  modified_base 15: mod_base = OTHER; note = 2'-O-methyl modified nucleotide
  modified_base 16: mod_base = OTHER; note = 2'-O-methyl modified nucleotide
  modified_base 17: mod_base = OTHER; note = 2'-O-methyl modified nucleotide
  modified_base 18: mod_base = OTHER; note = 2'-O-methyl modified nucleotide
  modified_base 19: mod_base = OTHER; note = 2'-O-methyl modified nucleotide
tggtcccaaagcaattcta

SEQ ID NO: 126 - RNA, 19 nt, synthetic construct
  source 1..19: mol_type = other RNA
  modified_base 1: mod_base = OTHER; note = 2'-O-methyl modified nucleotide with phosphorothioate linkage
  modified_base 2: mod_base = OTHER; note = 2'-O-methyl modified nucleotide with phosphorothioate linkage
  modified_base 3: mod_base = OTHER; note = 2'-O-methyl modified nucleotide
  modified_base 4: mod_base = OTHER; note = 2'-O-methyl modified nucleotide
  modified_base 5: mod_base = OTHER; note = 2'-fluoro modified nucleotide
  modified_base 6: mod_base = OTHER; note = 2'-O-methyl modified nucleotide
  modified_base 7: mod_base = OTHER; note = 2'-fluoro modified nucleotide
  modified_base 8: mod_base = OTHER; note = 2'-fluoro modified nucleotide
  modified_base 9: mod_base = OTHER; note = 2'-fluoro modified nucleotide
  modified_base 10: mod_base = OTHER; note = 2'-O-methyl modified nucleotide
  modified_base 11: mod_base = OTHER; note = 2'-O-methyl modified nucleotide
  modified_base 12: mod_base = OTHER; note = 2'-O-methyl modified nucleotide
  modified_base 13: mod_base = OTHER; note = 2'-O-methyl modified nucleotide
  modified_base 14: mod_base = OTHER; note = 2'-O-methyl modified nucleotide
  modified_base 15: mod_base = OTHER; note = 2'-O-methyl modified nucleotide
  modified_base 16: mod_base = OTHER; note = 2'-O-methyl modified nucleotide
  modified_base 17: mod_base = OTHER; note = 2'-O-methyl modified nucleotide
  modified_base 18: mod_base = OTHER; note = 2'-O-methyl modified nucleotide
  modified_base 19: mod_base = OTHER; note = 2'-O-methyl modified nucleotide
tccagtacatctatcagaa

SEQ ID NO: 127 - RNA, 19 nt, synthetic construct
  source 1..19: mol_type = other RNA
  modified_base 1: mod_base = OTHER; note = 2'-O-methyl modified nucleotide with phosphorothioate linkage
  modified_base 2: mod_base = OTHER; note = 2'-O-methyl modified nucleotide with phosphorothioate linkage
  modified_base 3: mod_base = OTHER; note = 2'-O-methyl modified nucleotide
  modified_base 4: mod_base = OTHER; note = 2'-O-methyl modified nucleotide
  modified_base 5: mod_base = OTHER; note = 2'-fluoro modified nucleotide
  modified_base 6: mod_base = OTHER; note = 2'-O-methyl modified nucleotide
  modified_base 7: mod_base = OTHER; note = 2'-fluoro modified nucleotide
  modified_base 8: mod_base = OTHER; note = 2'-fluoro modified nucleotide
  modified_base 9: mod_base = OTHER; note = 2'-fluoro modified nucleotide
  modified_base 10: mod_base = OTHER; note = 2'-O-methyl modified nucleotide
  modified_base 11: mod_base = OTHER; note = 2'-O-methyl modified nucleotide
  modified_base 12: mod_base = OTHER; note = 2'-O-methyl modified nucleotide
  modified_base 13: mod_base = OTHER; note = 2'-O-methyl modified nucleotide
  modified_base 14: mod_base = OTHER; note = 2'-O-methyl modified nucleotide
  modified_base 15: mod_base = OTHER; note = 2'-O-methyl modified nucleotide
  modified_base 16: mod_base = OTHER; note = 2'-O-methyl modified nucleotide
  modified_base 17: mod_base = OTHER; note = 2'-O-methyl modified nucleotide
  modified_base 18: mod_base = OTHER; note = 2'-O-methyl modified nucleotide
  modified_base 19: mod_base = OTHER; note = 2'-O-methyl modified nucleotide
ccagtacatctatcagaaa

SEQ ID NO: 128 - RNA, 19 nt, synthetic construct
  source 1..19: mol_type = other RNA
  modified_base 1: mod_base = OTHER; note = 2'-O-methyl modified nucleotide with phosphorothioate linkage
  modified_base 2: mod_base = OTHER; note = 2'-O-methyl modified nucleotide with phosphorothioate linkage
  modified_base 3: mod_base = OTHER; note = 2'-O-methyl modified nucleotide
  modified_base 4: mod_base = OTHER; note = 2'-O-methyl modified nucleotide
  modified_base 5: mod_base = OTHER; note = 2'-fluoro modified nucleotide
  modified_base 6: mod_base = OTHER; note = 2'-O-methyl modified nucleotide
  modified_base 7: mod_base = OTHER; note = 2'-fluoro modified nucleotide
  modified_base 8: mod_base = OTHER; note = 2'-fluoro modified nucleotide
  modified_base 9: mod_base = OTHER; note = 2'-fluoro modified nucleotide
  modified_base 10: mod_base = OTHER; note = 2'-O-methyl modified nucleotide
  modified_base 11: mod_base = OTHER; note = 2'-O-methyl modified nucleotide
  modified_base 12: mod_base = OTHER; note = 2'-O-methyl modified nucleotide
  modified_base 13: mod_base = OTHER; note = 2'-O-methyl modified nucleotide
  modified_base 14: mod_base = OTHER; note = 2'-O-methyl modified nucleotide
  modified_base 15: mod_base = OTHER; note = 2'-O-methyl modified nucleotide
  modified_base 16: mod_base = OTHER; note = 2'-O-methyl modified nucleotide
  modified_base 17: mod_base = OTHER; note = 2'-O-methyl modified nucleotide
  modified_base 18: mod_base = OTHER; note = 2'-O-methyl modified nucleotide
  modified_base 19: mod_base = OTHER; note = 2'-O-methyl modified nucleotide
atctatcagaatcatcaaa

SEQ ID NO: 129 - RNA, 19 nt, synthetic construct
  source 1..19: mol_type = other RNA
  modified_base 1: mod_base = OTHER; note = 2'-O-methyl modified nucleotide with phosphorothioate linkage
  modified_base 2: mod_base = OTHER; note = 2'-O-methyl modified nucleotide with phosphorothioate linkage
  modified_base 3: mod_base = OTHER; note = 2'-O-methyl modified nucleotide
  modified_base 4: mod_base = OTHER; note = 2'-O-methyl modified nucleotide
  modified_base 5: mod_base = OTHER; note = 2'-fluoro modified nucleotide
  modified_base 6: mod_base = OTHER; note = 2'-O-methyl modified nucleotide
  modified_base 7: mod_base = OTHER; note = 2'-fluoro modified nucleotide
  modified_base 8: mod_base = OTHER; note = 2'-fluoro modified nucleotide
  modified_base 9: mod_base = OTHER; note = 2'-fluoro modified nucleotide
  modified_base 10: mod_base = OTHER; note = 2'-O-methyl modified nucleotide
  modified_base 11: mod_base = OTHER; note = 2'-O-methyl modified nucleotide
  modified_base 12: mod_base = OTHER; note = 2'-O-methyl modified nucleotide
  modified_base 13: mod_base = OTHER; note = 2'-O-methyl modified nucleotide
  modified_base 14: mod_base = OTHER; note = 2'-O-methyl modified nucleotide
  modified_base 15: mod_base = OTHER; note = 2'-O-methyl modified nucleotide
  modified_base 16: mod_base = OTHER; note = 2'-O-methyl modified nucleotide
  modified_base 17: mod_base = OTHER; note = 2'-O-methyl modified nucleotide
  modified_base 18: mod_base = OTHER; note = 2'-O-methyl modified nucleotide
  modified_base 19: mod_base = OTHER; note = 2'-O-methyl modified nucleotide
aagtcactcaattcctgaa

SEQ ID NO: 130 - RNA, 19 nt, synthetic construct
  source 1..19: mol_type = other RNA
  modified_base 1: mod_base = OTHER; note = 2'-O-methyl modified nucleotide with phosphorothioate linkage
  modified_base 2: mod_base = OTHER; note = 2'-O-methyl modified nucleotide with phosphorothioate linkage
  modified_base 3: mod_base = OTHER; note = 2'-O-methyl modified nucleotide
  modified_base 4: mod_base = OTHER; note = 2'-O-methyl modified nucleotide
  modified_base 5: mod_base = OTHER; note = 2'-fluoro modified nucleotide
  modified_base 6: mod_base = OTHER; note = 2'-O-methyl modified nucleotide
  modified_base 7: mod_base = OTHER; note = 2'-fluoro modified nucleotide
  modified_base 8: mod_base = OTHER; note = 2'-fluoro modified nucleotide
  modified_base 9: mod_base = OTHER; note = 2'-fluoro modified nucleotide
  modified_base 10: mod_base = OTHER; note = 2'-O-methyl modified nucleotide
  modified_base 11: mod_base = OTHER; note = 2'-O-methyl modified nucleotide
  modified_base 12: mod_base = OTHER; note = 2'-O-methyl modified nucleotide
  modified_base 13: mod_base = OTHER; note = 2'-O-methyl modified nucleotide
  modified_base 14: mod_base = OTHER; note = 2'-O-methyl modified nucleotide
  modified_base 15: mod_base = OTHER; note = 2'-O-methyl modified nucleotide
  modified_base 16: mod_base = OTHER; note = 2'-O-methyl modified nucleotide
  modified_base 17: mod_base = OTHER; note = 2'-O-methyl modified nucleotide
  modified_base 18: mod_base = OTHER; note = 2'-O-methyl modified nucleotide
  modified_base 19: mod_base = OTHER; note = 2'-O-methyl modified nucleotide
cctgaactaatcaatataa

SEQ ID NO: 131 - RNA, 19 nt, synthetic construct
  source 1..19: mol_type = other RNA
  modified_base 1: mod_base = OTHER; note = 2'-O-methyl modified nucleotide with phosphorothioate linkage
  modified_base 2: mod_base = OTHER; note = 2'-O-methyl modified nucleotide with phosphorothioate linkage
  modified_base 3: mod_base = OTHER; note = 2'-O-methyl modified nucleotide
  modified_base 4: mod_base = OTHER; note = 2'-O-methyl modified nucleotide
  modified_base 5: mod_base = OTHER; note = 2'-fluoro modified nucleotide
  modified_base 6: mod_base = OTHER; note = 2'-O-methyl modified nucleotide
  modified_base 7: mod_base = OTHER; note = 2'-fluoro modified nucleotide
  modified_base 8: mod_base = OTHER; note = 2'-fluoro modified nucleotide
  modified_base 9: mod_base = OTHER; note = 2'-fluoro modified nucleotide
  modified_base 10: mod_base = OTHER; note = 2'-O-methyl modified nucleotide
  modified_base 11: mod_base = OTHER; note = 2'-O-methyl modified nucleotide
  modified_base 12: mod_base = OTHER; note = 2'-O-methyl modified nucleotide
  modified_base 13: mod_base = OTHER; note = 2'-O-methyl modified nucleotide
  modified_base 14: mod_base = OTHER; note = 2'-O-methyl modified nucleotide
  modified_base 15: mod_base = OTHER; note = 2'-O-methyl modified nucleotide
  modified_base 16: mod_base = OTHER; note = 2'-O-methyl modified nucleotide
  modified_base 17: mod_base = OTHER; note = 2'-O-methyl modified nucleotide
  modified_base 18: mod_base = OTHER; note = 2'-O-methyl modified nucleotide
  modified_base 19: mod_base = OTHER; note = 2'-O-methyl modified nucleotide
tgaactaatcaatatataa

SEQ ID NO: 132 - RNA, 19 nt, synthetic construct
  source 1..19: mol_type = other RNA
  modified_base 1: mod_base = OTHER; note = 2'-O-methyl modified nucleotide with phosphorothioate linkage
  modified_base 2: mod_base = OTHER; note = 2'-O-methyl modified nucleotide with phosphorothioate linkage
  modified_base 3: mod_base = OTHER; note = 2'-O-methyl modified nucleotide
  modified_base 4: mod_base = OTHER; note = 2'-O-methyl modified nucleotide
  modified_base 5: mod_base = OTHER; note = 2'-fluoro modified nucleotide
  modified_base 6: mod_base = OTHER; note = 2'-O-methyl modified nucleotide
  modified_base 7: mod_base = OTHER; note = 2'-fluoro modified nucleotide
  modified_base 8: mod_base = OTHER; note = 2'-fluoro modified nucleotide
  modified_base 9: mod_base = OTHER; note = 2'-fluoro modified nucleotide
  modified_base 10: mod_base = OTHER; note = 2'-O-methyl modified nucleotide
  modified_base 11: mod_base = OTHER; note = 2'-O-methyl modified nucleotide
  modified_base 12: mod_base = OTHER; note = 2'-O-methyl modified nucleotide
  modified_base 13: mod_base = OTHER; note = 2'-O-methyl modified nucleotide
  modified_base 14: mod_base = OTHER; note = 2'-O-methyl modified nucleotide
  modified_base 15: mod_base = OTHER; note = 2'-O-methyl modified nucleotide
  modified_base 16: mod_base = OTHER; note = 2'-O-methyl modified nucleotide
  modified_base 17: mod_base = OTHER; note = 2'-O-methyl modified nucleotide
  modified_base 18: mod_base = OTHER; note = 2'-O-methyl modified nucleotide
  modified_base 19: mod_base = OTHER; note = 2'-O-methyl modified nucleotide
tggttctcattccttgcaa

SEQ ID NO: 133 - RNA, 19 nt, synthetic construct
  source 1..19: mol_type = other RNA
  modified_base 1: mod_base = OTHER; note = 2'-O-methyl modified nucleotide with phosphorothioate linkage
  modified_base 2: mod_base = OTHER; note = 2'-O-methyl modified nucleotide with phosphorothioate linkage
  modified_base 3: mod_base = OTHER; note = 2'-O-methyl modified nucleotide
  modified_base 4: mod_base = OTHER; note = 2'-O-methyl modified nucleotide
  modified_base 5: mod_base = OTHER; note = 2'-fluoro modified nucleotide
  modified_base 6: mod_base = OTHER; note = 2'-O-methyl modified nucleotide
  modified_base 7: mod_base = OTHER; note = 2'-fluoro modified nucleotide
  modified_base 8: mod_base = OTHER; note = 2'-fluoro modified nucleotide
  modified_base 9: mod_base = OTHER; note = 2'-fluoro modified nucleotide
  modified_base 10: mod_base = OTHER; note = 2'-O-methyl modified nucleotide
  modified_base 11: mod_base = OTHER; note = 2'-O-methyl modified nucleotide
  modified_base 12: mod_base = OTHER; note = 2'-O-methyl modified nucleotide
  modified_base 13: mod_base = OTHER; note = 2'-O-methyl modified nucleotide
  modified_base 14: mod_base = OTHER; note = 2'-O-methyl modified nucleotide
  modified_base 15: mod_base = OTHER; note = 2'-O-methyl modified nucleotide
  modified_base 16: mod_base = OTHER; note = 2'-O-methyl modified nucleotide
  modified_base 17: mod_base = OTHER; note = 2'-O-methyl modified nucleotide
  modified_base 18: mod_base = OTHER; note = 2'-O-methyl modified nucleotide
  modified_base 19: mod_base = OTHER; note = 2'-O-methyl modified nucleotide
ctcattccttgcaccataa

SEQ ID NO: 134 - RNA, 19 nt, synthetic construct
  source 1..19: mol_type = other RNA
  modified_base 1: mod_base = OTHER; note = 2'-O-methyl modified nucleotide with phosphorothioate linkage
  modified_base 2: mod_base = OTHER; note = 2'-O-methyl modified nucleotide with phosphorothioate linkage
  modified_base 3: mod_base = OTHER; note = 2'-O-methyl modified nucleotide
  modified_base 4: mod_base = OTHER; note = 2'-O-methyl modified nucleotide
  modified_base 5: mod_base = OTHER; note = 2'-fluoro modified nucleotide
  modified_base 6: mod_base = OTHER; note = 2'-O-methyl modified nucleotide
  modified_base 7: mod_base = OTHER; note = 2'-fluoro modified nucleotide
  modified_base 8: mod_base = OTHER; note = 2'-fluoro modified nucleotide
  modified_base 9: mod_base = OTHER; note = 2'-fluoro modified nucleotide
  modified_base 10: mod_base = OTHER; note = 2'-O-methyl modified nucleotide
  modified_base 11: mod_base = OTHER; note = 2'-O-methyl modified nucleotide
  modified_base 12: mod_base = OTHER; note = 2'-O-methyl modified nucleotide
  modified_base 13: mod_base = OTHER; note = 2'-O-methyl modified nucleotide
  modified_base 14: mod_base = OTHER; note = 2'-O-methyl modified nucleotide
  modified_base 15: mod_base = OTHER; note = 2'-O-methyl modified nucleotide
  modified_base 16: mod_base = OTHER; note = 2'-O-methyl modified nucleotide
  modified_base 17: mod_base = OTHER; note = 2'-O-methyl modified nucleotide
  modified_base 18: mod_base = OTHER; note = 2'-O-methyl modified nucleotide
  modified_base 19: mod_base = OTHER; note = 2'-O-methyl modified nucleotide
ttggctttctgctgggtta

SEQ ID NO: 135 - RNA, 19 nt, synthetic construct
  source 1..19: mol_type = other RNA
  modified_base 1: mod_base = OTHER; note = 2'-O-methyl modified nucleotide with phosphorothioate linkage
  modified_base 2: mod_base = OTHER; note = 2'-O-methyl modified nucleotide with phosphorothioate linkage
  modified_base 3: mod_base = OTHER; note = 2'-O-methyl modified nucleotide
  modified_base 4: mod_base = OTHER; note = 2'-O-methyl modified nucleotide
  modified_base 5: mod_base = OTHER; note = 2'-fluoro modified nucleotide
  modified_base 6: mod_base = OTHER; note = 2'-O-methyl modified nucleotide
  modified_base 7: mod_base = OTHER; note = 2'-fluoro modified nucleotide
  modified_base 8: mod_base = OTHER; note = 2'-fluoro modified nucleotide
  modified_base 9: mod_base = OTHER; note = 2'-fluoro modified nucleotide
  modified_base 10: mod_base = OTHER; note = 2'-O-methyl modified nucleotide
  modified_base 11: mod_base = OTHER; note = 2'-O-methyl modified nucleotide
  modified_base 12: mod_base = OTHER; note = 2'-O-methyl modified nucleotide
  modified_base 13: mod_base = OTHER; note = 2'-O-methyl modified nucleotide
  modified_base 14: mod_base = OTHER; note = 2'-O-methyl modified nucleotide
  modified_base 15: mod_base = OTHER; note = 2'-O-methyl modified nucleotide
  modified_base 16: mod_base = OTHER; note = 2'-O-methyl modified nucleotide
  modified_base 17: mod_base = OTHER; note = 2'-O-methyl modified nucleotide
  modified_base 18: mod_base = OTHER; note = 2'-O-methyl modified nucleotide
  modified_base 19: mod_base = OTHER; note = 2'-O-methyl modified nucleotide
tcctctacatgattttcca

SEQ ID NO: 136 - RNA, 21 nt, synthetic construct
  source 1..21: mol_type = other RNA
  modified_base 1: mod_base = OTHER; note = 2'-O-methyl modified nucleotide with phosphorothioate linkage
  modified_base 2: mod_base = OTHER; note = 2'-O-methyl modified nucleotide with phosphorothioate linkage
  modified_base 3: mod_base = OTHER; note = 2'-O-methyl modified nucleotide
  modified_base 4: mod_base = OTHER; note = 2'-O-methyl modified nucleotide
  modified_base 5: mod_base = OTHER; note = 2'-O-methyl modified nucleotide
  modified_base 6: mod_base = OTHER; note = 2'-O-methyl modified nucleotide
  modified_base 7: mod_base = OTHER; note = 2'-fluoro modified nucleotide
  modified_base 8: mod_base = OTHER; note = 2'-O-methyl modified nucleotide
  modified_base 9: mod_base = OTHER; note = 2'-fluoro modified nucleotide
  modified_base 10: mod_base = OTHER; note = 2'-fluoro modified nucleotide
  modified_base 11: mod_base = OTHER; note = 2'-fluoro modified nucleotide
  modified_base 12: mod_base = OTHER; note = 2'-O-methyl modified nucleotide
  modified_base 13: mod_base = OTHER; note = 2'-O-methyl modified nucleotide
  modified_base 14: mod_base = OTHER; note = 2'-O-methyl modified nucleotide
  modified_base 15: mod_base = OTHER; note = 2'-O-methyl modified nucleotide
  modified_base 16: mod_base = OTHER; note = 2'-O-methyl modified nucleotide
  modified_base 17: mod_base = OTHER; note = 2'-O-methyl modified nucleotide
  modified_base 18: mod_base = OTHER; note = 2'-O-methyl modified nucleotide
  modified_base 19: mod_base = OTHER; note = 2'-O-methyl modified nucleotide
  modified_base 20: mod_base = OTHER; note = 2'-O-methyl modified nucleotide
  modified_base 21: mod_base = OTHER; note = 2'-O-methyl modified nucleotide
caagatcaaggctcacttata

SEQ ID NO: 137 - RNA, 21 nt, synthetic construct
  source 1..21: mol_type = other RNA
  modified_base 1: mod_base = OTHER; note = 2'-O-methyl modified nucleotide with phosphorothioate linkage
  modified_base 2: mod_base = OTHER; note = 2'-O-methyl modified nucleotide with phosphorothioate linkage
  modified_base 3: mod_base = OTHER; note = 2'-O-methyl modified nucleotide
  modified_base 4: mod_base = OTHER; note = 2'-O-methyl modified nucleotide
  modified_base 5: mod_base = OTHER; note = 2'-O-methyl modified nucleotide
  modified_base 6: mod_base = OTHER; note = 2'-O-methyl modified nucleotide
  modified_base 7: mod_base = OTHER; note = 2'-fluoro modified nucleotide
  modified_base 8: mod_base = OTHER; note = 2'-O-methyl modified nucleotide
  modified_base 9: mod_base = OTHER; note = 2'-fluoro modified nucleotide
  modified_base 10: mod_base = OTHER; note = 2'-fluoro modified nucleotide
  modified_base 11: mod_base = OTHER; note = 2'-fluoro modified nucleotide
  modified_base 12: mod_base = OTHER; note = 2'-O-methyl modified nucleotide
  modified_base 13: mod_base = OTHER; note = 2'-O-methyl modified nucleotide
  modified_base 14: mod_base = OTHER; note = 2'-O-methyl modified nucleotide
  modified_base 15: mod_base = OTHER; note = 2'-O-methyl modified nucleotide
  modified_base 16: mod_base = OTHER; note = 2'-O-methyl modified nucleotide
  modified_base 17: mod_base = OTHER; note = 2'-O-methyl modified nucleotide
  modified_base 18: mod_base = OTHER; note = 2'-O-methyl modified nucleotide
  modified_base 19: mod_base = OTHER; note = 2'-O-methyl modified nucleotide
  modified_base 20: mod_base = OTHER; note = 2'-O-methyl modified nucleotide
  modified_base 21: mod_base = OTHER; note = 2'-O-methyl modified nucleotide
cctcagcattgtgatgaccaa

SEQ ID NO: 138 - RNA, 21 nt, synthetic construct
  source 1..21: mol_type = other RNA
  modified_base 1: mod_base = OTHER; note = 2'-O-methyl modified nucleotide with phosphorothioate linkage
  modified_base 2: mod_base = OTHER; note = 2'-O-methyl modified nucleotide with phosphorothioate linkage
  modified_base 3: mod_base = OTHER; note = 2'-O-methyl modified nucleotide
  modified_base 4: mod_base = OTHER; note = 2'-O-methyl modified nucleotide
  modified_base 5: mod_base = OTHER; note = 2'-O-methyl modified nucleotide
  modified_base 6: mod_base = OTHER; note = 2'-O-methyl modified nucleotide
  modified_base 7: mod_base = OTHER; note = 2'-fluoro modified nucleotide
  modified_base 8: mod_base = OTHER; note = 2'-O-methyl modified nucleotide
  modified_base 9: mod_base = OTHER; note = 2'-fluoro modified nucleotide
  modified_base 10: mod_base = OTHER; note = 2'-fluoro modified nucleotide
  modified_base 11: mod_base = OTHER; note = 2'-fluoro modified nucleotide
  modified_base 12: mod_base = OTHER; note = 2'-O-methyl modified nucleotide
  modified_base 13: mod_base = OTHER; note = 2'-O-methyl modified nucleotide
  modified_base 14: mod_base = OTHER; note = 2'-O-methyl modified nucleotide
  modified_base 15: mod_base = OTHER; note = 2'-O-methyl modified nucleotide
  modified_base 16: mod_base = OTHER; note = 2'-O-methyl modified nucleotide
  modified_base 17: mod_base = OTHER; note = 2'-O-methyl modified nucleotide
  modified_base 18: mod_base = OTHER; note = 2'-O-methyl modified nucleotide
  modified_base 19: mod_base = OTHER; note = 2'-O-methyl modified nucleotide
  modified_base 20: mod_base = OTHER; note = 2'-O-methyl modified nucleotide
  modified_base 21: mod_base = OTHER; note = 2'-O-methyl modified nucleotide
gatcatcattctcttgtgcaa

SEQ ID NO: 139 - RNA, 21 nt, synthetic construct
  source 1..21: mol_type = other RNA
  modified_base 1: mod_base = OTHER; note = 2'-O-methyl modified nucleotide with phosphorothioate linkage
  modified_base 2: mod_base = OTHER; note = 2'-O-methyl modified nucleotide with phosphorothioate linkage
  modified_base 3: mod_base = OTHER; note = 2'-O-methyl modified nucleotide
  modified_base 4: mod_base = OTHER; note = 2'-O-methyl modified nucleotide
  modified_base 5: mod_base = OTHER; note = 2'-O-methyl modified nucleotide
  modified_base 6: mod_base = OTHER; note = 2'-O-methyl modified nucleotide
  modified_base 7: mod_base = OTHER; note = 2'-fluoro modified nucleotide
  modified_base 8: mod_base = OTHER; note = 2'-O-methyl modified nucleotide
  modified_base 9: mod_base = OTHER; note = 2'-fluoro modified nucleotide
  modified_base 10: mod_base = OTHER; note = 2'-fluoro modified nucleotide
  modified_base 11: mod_base = OTHER; note = 2'-fluoro modified nucleotide
  modified_base 12: mod_base = OTHER; note = 2'-O-methyl modified nucleotide
  modified_base 13: mod_base = OTHER; note = 2'-O-methyl modified nucleotide
  modified_base 14: mod_base = OTHER; note = 2'-O-methyl modified nucleotide
  modified_base 15: mod_base = OTHER; note = 2'-O-methyl modified nucleotide
  modified_base 16: mod_base = OTHER; note = 2'-O-methyl modified nucleotide
  modified_base 17: mod_base = OTHER; note = 2'-O-methyl modified nucleotide
  modified_base 18: mod_base = OTHER; note = 2'-O-methyl modified nucleotide
  modified_base 19: mod_base = OTHER; note = 2'-O-methyl modified nucleotide
  modified_base 20: mod_base = OTHER; note = 2'-O-methyl modified nucleotide
  modified_base 21: mod_base = OTHER; note = 2'-O-methyl modified nucleotide
tgtggccgtcacagttctcta

SEQ ID NO: 140 - RNA, 21 nt, synthetic construct
  source 1..21: mol_type = other RNA
  modified_base 1: mod_base = OTHER; note = 2'-O-methyl modified nucleotide with phosphorothioate linkage
  modified_base 2: mod_base = OTHER; note = 2'-O-methyl modified nucleotide with phosphorothioate linkage
  modified_base 3: mod_base = OTHER; note = 2'-O-methyl modified nucleotide
  modified_base 4: mod_base = OTHER; note = 2'-O-methyl modified nucleotide
  modified_base 5: mod_base = OTHER; note = 2'-O-methyl modified nucleotide
  modified_base 6: mod_base = OTHER; note = 2'-O-methyl modified nucleotide
  modified_base 7: mod_base = OTHER; note = 2'-fluoro modified nucleotide
  modified_base 8: mod_base = OTHER; note = 2'-O-methyl modified nucleotide
  modified_base 9: mod_base = OTHER; note = 2'-fluoro modified nucleotide
  modified_base 10: mod_base = OTHER; note = 2'-fluoro modified nucleotide
  modified_base 11: mod_base = OTHER; note = 2'-fluoro modified nucleotide
  modified_base 12: mod_base = OTHER; note = 2'-O-methyl modified nucleotide
  modified_base 13: mod_base = OTHER; note = 2'-O-methyl modified nucleotide
  modified_base 14: mod_base = OTHER; note = 2'-O-methyl modified nucleotide
  modified_base 15: mod_base = OTHER; note = 2'-O-methyl modified nucleotide
  modified_base 16: mod_base = OTHER; note = 2'-O-methyl modified nucleotide
  modified_base 17: mod_base = OTHER; note = 2'-O-methyl modified nucleotide
  modified_base 18: mod_base = OTHER; note = 2'-O-methyl modified nucleotide
  modified_base 19: mod_base = OTHER; note = 2'-O-methyl modified nucleotide
  modified_base 20: mod_base = OTHER; note = 2'-O-methyl modified nucleotide
  modified_base 21: mod_base = OTHER; note = 2'-O-methyl modified nucleotide
tctggtcccaaagcaattcta

SEQ ID NO: 141 - RNA, 21 nt, synthetic construct
  source 1..21: mol_type = other RNA
  modified_base 1: mod_base = OTHER; note = 2'-O-methyl modified nucleotide with phosphorothioate linkage
  modified_base 2: mod_base = OTHER; note = 2'-O-methyl modified nucleotide with phosphorothioate linkage
  modified_base 3: mod_base = OTHER; note = 2'-O-methyl modified nucleotide
  modified_base 4: mod_base = OTHER; note = 2'-O-methyl modified nucleotide
  modified_base 5: mod_base = OTHER; note = 2'-O-methyl modified nucleotide
  modified_base 6: mod_base = OTHER; note = 2'-O-methyl modified nucleotide
  modified_base 7: mod_base = OTHER; note = 2'-fluoro modified nucleotide
  modified_base 8: mod_base = OTHER; note = 2'-O-methyl modified nucleotide
  modified_base 9: mod_base = OTHER; note = 2'-fluoro modified nucleotide
  modified_base 10: mod_base = OTHER; note = 2'-fluoro modified nucleotide
  modified_base 11: mod_base = OTHER; note = 2'-fluoro modified nucleotide
  modified_base 12: mod_base = OTHER; note = 2'-O-methyl modified nucleotide
  modified_base 13: mod_base = OTHER; note = 2'-O-methyl modified nucleotide
  modified_base 14: mod_base = OTHER; note = 2'-O-methyl modified nucleotide
  modified_base 15: mod_base = OTHER; note = 2'-O-methyl modified nucleotide
  modified_base 16: mod_base = OTHER; note = 2'-O-methyl modified nucleotide
  modified_base 17: mod_base = OTHER; note = 2'-O-methyl modified nucleotide
  modified_base 18: mod_base = OTHER; note = 2'-O-methyl modified nucleotide
  modified_base 19: mod_base = OTHER; note = 2'-O-methyl modified nucleotide
  modified_base 20: mod_base = OTHER; note = 2'-O-methyl modified nucleotide
  modified_base 21: mod_base = OTHER; note = 2'-O-methyl modified nucleotide
tttccagtacatctatcagaa

SEQ ID NO: 142 - RNA, 21 nt, synthetic construct
  source 1..21: mol_type = other RNA
  modified_base 1: mod_base = OTHER; note = 2'-O-methyl modified nucleotide with phosphorothioate linkage
  modified_base 2: mod_base = OTHER; note = 2'-O-methyl modified nucleotide with phosphorothioate linkage
  modified_base 3: mod_base = OTHER; note = 2'-O-methyl modified nucleotide
  modified_base 4: mod_base = OTHER; note = 2'-O-methyl modified nucleotide
  modified_base 5: mod_base = OTHER; note = 2'-O-methyl modified nucleotide
  modified_base 6: mod_base = OTHER; note = 2'-O-methyl modified nucleotide
  modified_base 7: mod_base = OTHER; note = 2'-fluoro modified nucleotide
  modified_base 8: mod_base = OTHER; note = 2'-O-methyl modified nucleotide
  modified_base 9: mod_base = OTHER; note = 2'-fluoro modified nucleotide
  modified_base 10: mod_base = OTHER; note = 2'-fluoro modified nucleotide
  modified_base 11: mod_base = OTHER; note = 2'-fluoro modified nucleotide
  modified_base 12: mod_base = OTHER; note = 2'-O-methyl modified nucleotide
  modified_base 13: mod_base = OTHER; note = 2'-O-methyl modified nucleotide
  modified_base 14: mod_base = OTHER; note = 2'-O-methyl modified nucleotide
  modified_base 15: mod_base = OTHER; note = 2'-O-methyl modified nucleotide
  modified_base 16: mod_base = OTHER; note = 2'-O-methyl modified nucleotide
  modified_base 17: mod_base = OTHER; note = 2'-O-methyl modified nucleotide
  modified_base 18: mod_base = OTHER; note = 2'-O-methyl modified nucleotide
  modified_base 19: mod_base = OTHER; note = 2'-O-methyl modified nucleotide
  modified_base 20: mod_base = OTHER; note = 2'-O-methyl modified nucleotide
  modified_base 21: mod_base = OTHER; note = 2'-O-methyl modified nucleotide
ttccagtacatctatcagaaa

SEQ ID NO: 143 - RNA, 21 nt, synthetic construct
  source 1..21: mol_type = other RNA
  modified_base 1: mod_base = OTHER; note = 2'-O-methyl modified nucleotide with phosphorothioate linkage
  modified_base 2: mod_base = OTHER; note = 2'-O-methyl modified nucleotide with phosphorothioate linkage
  modified_base 3: mod_base = OTHER; note = 2'-O-methyl modified nucleotide
  modified_base 4: mod_base = OTHER; note = 2'-O-methyl modified nucleotide
  modified_base 5: mod_base = OTHER; note = 2'-O-methyl modified nucleotide
  modified_base 6: mod_base = OTHER; note = 2'-O-methyl modified nucleotide
  modified_base 7: mod_base = OTHER; note = 2'-fluoro modified nucleotide
  modified_base 8: mod_base = OTHER; note = 2'-O-methyl modified nucleotide
  modified_base 9: mod_base = OTHER; note = 2'-fluoro modified nucleotide
  modified_base 10: mod_base = OTHER; note = 2'-fluoro modified nucleotide
  modified_base 11: mod_base = OTHER; note = 2'-fluoro modified nucleotide
  modified_base 12: mod_base = OTHER; note = 2'-O-methyl modified nucleotide
  modified_base 13: mod_base = OTHER; note = 2'-O-methyl modified nucleotide
  modified_base 14: mod_base = OTHER; note = 2'-O-methyl modified nucleotide
  modified_base 15: mod_base = OTHER; note = 2'-O-methyl modified nucleotide
  modified_base 16: mod_base = OTHER; note = 2'-O-methyl modified nucleotide
  modified_base 17: mod_base = OTHER; note = 2'-O-methyl modified nucleotide
  modified_base 18: mod_base = OTHER; note = 2'-O-methyl modified nucleotide
  modified_base 19: mod_base = OTHER; note = 2'-O-methyl modified nucleotide
  modified_base 20: mod_base = OTHER; note = 2'-O-methyl modified nucleotide
  modified_base 21: mod_base = OTHER; note = 2'-O-methyl modified nucleotide
acatctatcagaatcatcaaa

SEQ ID NO: 144 - RNA, 21 nt, synthetic construct
  source 1..21: mol_type = other RNA
  modified_base 1: mod_base = OTHER; note = 2'-O-methyl modified nucleotide with phosphorothioate linkage
  modified_base 2: mod_base = OTHER; note = 2'-O-methyl modified nucleotide with phosphorothioate linkage
  modified_base 3: mod_base = OTHER; note = 2'-O-methyl modified nucleotide
  modified_base 4: mod_base = OTHER; note = 2'-O-methyl modified nucleotide
  modified_base 5: mod_base = OTHER; note = 2'-O-methyl modified nucleotide
  modified_base 6: mod_base = OTHER; note = 2'-O-methyl modified nucleotide
  modified_base 7: mod_base = OTHER; note = 2'-fluoro modified nucleotide
  modified_base 8: mod_base = OTHER; note = 2'-O-methyl modified nucleotide
  modified_base 9: mod_base = OTHER; note = 2'-fluoro modified nucleotide
  modified_base 10: mod_base = OTHER; note = 2'-fluoro modified nucleotide
  modified_base 11: mod_base = OTHER; note = 2'-fluoro modified nucleotide
  modified_base 12: mod_base = OTHER; note = 2'-O-methyl modified nucleotide
  modified_base 13: mod_base = OTHER; note = 2'-O-methyl modified nucleotide
  modified_base 14: mod_base = OTHER; note = 2'-O-methyl modified nucleotide
  modified_base 15: mod_base = OTHER; note = 2'-O-methyl modified nucleotide
  modified_base 16: mod_base = OTHER; note = 2'-O-methyl modified nucleotide
  modified_base 17: mod_base = OTHER; note = 2'-O-methyl modified nucleotide
  modified_base 18: mod_base = OTHER; note = 2'-O-methyl modified nucleotide
  modified_base 19: mod_base = OTHER; note = 2'-O-methyl modified nucleotide
  modified_base 20: mod_base = OTHER; note = 2'-O-methyl modified nucleotide
  modified_base 21: mod_base = OTHER; note = 2'-O-methyl modified nucleotide
taaagtcactcaattcctgaa

SEQ ID NO: 145 - RNA, 21 nt, synthetic construct
  source 1..21: mol_type = other RNA
  modified_base 1: mod_base = OTHER; note = 2'-O-methyl modified nucleotide with phosphorothioate linkage
  modified_base 2: mod_base = OTHER; note = 2'-O-methyl modified nucleotide with phosphorothioate linkage
  modified_base 3: mod_base = OTHER; note = 2'-O-methyl modified nucleotide
  modified_base 4: mod_base = OTHER; note = 2'-O-methyl modified nucleotide
  modified_base 5: mod_base = OTHER; note = 2'-O-methyl modified nucleotide
  modified_base 6: mod_base = OTHER; note = 2'-O-methyl modified nucleotide
  modified_base 7: mod_base = OTHER; note = 2'-fluoro modified nucleotide
  modified_base 8: mod_base = OTHER; note = 2'-O-methyl modified nucleotide
  modified_base 9: mod_base = OTHER; note = 2'-fluoro modified nucleotide
  modified_base 10: mod_base = OTHER; note = 2'-fluoro modified nucleotide
  modified_base 11: mod_base = OTHER; note = 2'-fluoro modified nucleotide
  modified_base 12: mod_base = OTHER; note = 2'-O-methyl modified nucleotide
  modified_base 13: mod_base = OTHER; note = 2'-O-methyl modified nucleotide
  modified_base 14: mod_base = OTHER; note = 2'-O-methyl modified nucleotide
  modified_base 15: mod_base = OTHER; note = 2'-O-methyl modified nucleotide
  modified_base 16: mod_base = OTHER; note = 2'-O-methyl modified nucleotide
  modified_base 17: mod_base = OTHER; note = 2'-O-methyl modified nucleotide
  modified_base 18: mod_base = OTHER; note = 2'-O-methyl modified nucleotide
  modified_base 19: mod_base = OTHER; note = 2'-O-methyl modified nucleotide
  modified_base 20: mod_base = OTHER; note = 2'-O-methyl modified nucleotide
  modified_base 21: mod_base = OTHER; note = 2'-O-methyl modified nucleotide
ttcctgaactaatcaatataa

SEQ ID NO: 146 - RNA, 21 nt, synthetic construct
  source 1..21: mol_type = other RNA
  modified_base 1: mod_base = OTHER; note = 2'-O-methyl modified nucleotide with phosphorothioate linkage
  modified_base 2: mod_base = OTHER; note = 2'-O-methyl modified nucleotide with phosphorothioate linkage
  modified_base 3: mod_base = OTHER; note = 2'-O-methyl modified nucleotide
  modified_base 4: mod_base = OTHER; note = 2'-O-methyl modified nucleotide
  modified_base 5: mod_base = OTHER; note = 2'-O-methyl modified nucleotide
  modified_base 6: mod_base = OTHER; note = 2'-O-methyl modified nucleotide
  modified_base 7: mod_base = OTHER; note = 2'-fluoro modified nucleotide
  modified_base 8: mod_base = OTHER; note = 2'-O-methyl modified nucleotide
  modified_base 9: mod_base = OTHER; note = 2'-fluoro modified nucleotide
  modified_base 10: mod_base = OTHER; note = 2'-fluoro modified nucleotide
  modified_base 11: mod_base = OTHER; note = 2'-fluoro modified nucleotide
  modified_base 12: mod_base = OTHER; note = 2'-O-methyl modified nucleotide
  modified_base 13: mod_base = OTHER; note = 2'-O-methyl modified nucleotide
  modified_base 14: mod_base = OTHER; note = 2'-O-methyl modified nucleotide
  modified_base 15: mod_base = OTHER; note = 2'-O-methyl modified nucleotide
  modified_base 16: mod_base = OTHER; note = 2'-O-methyl modified nucleotide
  modified_base 17: mod_base = OTHER; note = 2'-O-methyl modified nucleotide
  modified_base 18: mod_base = OTHER; note = 2'-O-methyl modified nucleotide
  modified_base 19: mod_base = OTHER; note = 2'-O-methyl modified nucleotide
  modified_base 20: mod_base = OTHER; note = 2'-O-methyl modified nucleotide
  modified_base 21: mod_base = OTHER; note = 2'-O-methyl modified nucleotide
cctgaactaatcaatatataa

SEQ ID NO: 147 - RNA, 21 nt, synthetic construct
  source 1..21: mol_type = other RNA
  modified_base 1: mod_base = OTHER; note = 2'-O-methyl modified nucleotide with phosphorothioate linkage
  modified_base 2: mod_base = OTHER; note = 2'-O-methyl modified nucleotide with phosphorothioate linkage
  modified_base 3: mod_base = OTHER; note = 2'-O-methyl modified nucleotide
  modified_base 4: mod_base = OTHER; note = 2'-O-methyl modified nucleotide
  modified_base 5: mod_base = OTHER; note = 2'-O-methyl modified nucleotide
  modified_base 6: mod_base = OTHER; note = 2'-O-methyl modified nucleotide
  modified_base 7: mod_base = OTHER; note = 2'-fluoro modified nucleotide
  modified_base 8: mod_base = OTHER; note = 2'-O-methyl modified nucleotide
  modified_base 9: mod_base = OTHER; note = 2'-fluoro modified nucleotide
  modified_base 10: mod_base = OTHER; note = 2'-fluoro modified nucleotide
  modified_base 11: mod_base = OTHER; note = 2'-fluoro modified nucleotide
  modified_base 12: mod_base = OTHER; note = 2'-O-methyl modified nucleotide
  modified_base 13: mod_base = OTHER; note = 2'-O-methyl modified nucleotide
  modified_base 14: mod_base = OTHER; note = 2'-O-methyl modified nucleotide
  modified_base 15: mod_base = OTHER; note = 2'-O-methyl modified nucleotide
  modified_base 16: mod_base = OTHER; note = 2'-O-methyl modified nucleotide
  modified_base 17: mod_base = OTHER; note = 2'-O-methyl modified nucleotide
  modified_base 18: mod_base = OTHER; note = 2'-O-methyl modified nucleotide
  modified_base 19: mod_base = OTHER; note = 2'-O-methyl modified nucleotide
  modified_base 20: mod_base = OTHER; note = 2'-O-methyl modified nucleotide
  modified_base 21: mod_base = OTHER; note = 2'-O-methyl modified nucleotide
cctggttctcattccttgcaa

SEQ ID NO: 148 - RNA, 21 nt, synthetic construct
  source 1..21: mol_type = other RNA
  modified_base 1: mod_base = OTHER; note = 2'-O-methyl modified nucleotide with phosphorothioate linkage
  modified_base 2: mod_base = OTHER; note = 2'-O-methyl modified nucleotide with phosphorothioate linkage
  modified_base 3: mod_base = OTHER; note = 2'-O-methyl modified nucleotide
  modified_base 4: mod_base = OTHER; note = 2'-O-methyl modified nucleotide
  modified_base 5: mod_base = OTHER; note = 2'-O-methyl modified nucleotide
  modified_base 6: mod_base = OTHER; note = 2'-O-methyl modified nucleotide
  modified_base 7: mod_base = OTHER; note = 2'-fluoro modified nucleotide
  modified_base 8: mod_base = OTHER; note = 2'-O-methyl modified nucleotide
  modified_base 9: mod_base = OTHER; note = 2'-fluoro modified nucleotide
  modified_base 10: mod_base = OTHER; note = 2'-fluoro modified nucleotide
  modified_base 11: mod_base = OTHER; note = 2'-fluoro modified nucleotide
  modified_base 12: mod_base = OTHER; note = 2'-O-methyl modified nucleotide
  modified_base 13: mod_base = OTHER; note = 2'-O-methyl modified nucleotide
  modified_base 14: mod_base = OTHER; note = 2'-O-methyl modified nucleotide
  modified_base 15: mod_base = OTHER; note = 2'-O-methyl modified nucleotide
  modified_base 16: mod_base = OTHER; note = 2'-O-methyl modified nucleotide
  modified_base 17: mod_base = OTHER; note = 2'-O-methyl modified nucleotide
  modified_base 18: mod_base = OTHER; note = 2'-O-methyl modified nucleotide
  modified_base 19: mod_base = OTHER; note = 2'-O-methyl modified nucleotide
  modified_base 20: mod_base = OTHER; note = 2'-O-methyl modified nucleotide
  modified_base 21: mod_base = OTHER; note = 2'-O-methyl modified nucleotide
ttctcattccttgcaccataa

SEQ ID NO: 149 - RNA, 21 nt, synthetic construct
  source 1..21: mol_type = other RNA
  modified_base 1: mod_base = OTHER; note = 2'-O-methyl modified nucleotide with phosphorothioate linkage
  modified_base 2: mod_base = OTHER; note = 2'-O-methyl modified nucleotide with phosphorothioate linkage
  modified_base 3: mod_base = OTHER; note = 2'-O-methyl modified nucleotide
  modified_base 4: mod_base = OTHER; note = 2'-O-methyl modified nucleotide
  modified_base 5: mod_base = OTHER; note = 2'-O-methyl modified nucleotide
  modified_base 6: mod_base = OTHER; note = 2'-O-methyl modified nucleotide
  modified_base 7: mod_base = OTHER; note = 2'-fluoro modified nucleotide
  modified_base 8: mod_base = OTHER; note = 2'-O-methyl modified nucleotide
  modified_base 9: mod_base = OTHER; note = 2'-fluoro modified nucleotide
  modified_base 10: mod_base = OTHER; note = 2'-fluoro modified nucleotide
  modified_base 11: mod_base = OTHER; note = 2'-fluoro modified nucleotide
  modified_base 12: mod_base = OTHER; note = 2'-O-methyl modified nucleotide
  modified_base 13: mod_base = OTHER; note = 2'-O-methyl modified nucleotide
  modified_base 14: mod_base = OTHER; note = 2'-O-methyl modified nucleotide
  modified_base 15: mod_base = OTHER; note = 2'-O-methyl modified nucleotide
  modified_base 16: mod_base = OTHER; note = 2'-O-methyl modified nucleotide
  modified_base 17: mod_base = OTHER; note = 2'-O-methyl modified nucleotide
  modified_base 18: mod_base = OTHER; note = 2'-O-methyl modified nucleotide
  modified_base 19: mod_base = OTHER; note = 2'-O-methyl modified nucleotide
  modified_base 20: mod_base = OTHER; note = 2'-O-methyl modified nucleotide
  modified_base 21: mod_base = OTHER; note = 2'-O-methyl modified nucleotide
tattggctttctgctgggtta

SEQ ID NO: 150 - RNA, 21 nt, synthetic construct
  source 1..21: mol_type = other RNA
  modified_base 1: mod_base = OTHER; note = 2'-O-methyl modified nucleotide with phosphorothioate linkage
  modified_base 2: mod_base = OTHER; note = 2'-O-methyl modified nucleotide with phosphorothioate linkage
  modified_base 3: mod_base = OTHER; note = 2'-O-methyl modified nucleotide
  modified_base 4: mod_base = OTHER; note = 2'-O-methyl modified nucleotide
  modified_base 5: mod_base = OTHER; note = 2'-O-methyl modified nucleotide
  modified_base 6: mod_base = OTHER; note = 2'-O-methyl modified nucleotide
  modified_base 7: mod_base = OTHER; note = 2'-fluoro modified nucleotide
  modified_base 8: mod_base = OTHER; note = 2'-O-methyl modified nucleotide
  modified_base 9: mod_base = OTHER; note = 2'-fluoro modified nucleotide
  modified_base 10: mod_base = OTHER; note = 2'-fluoro modified nucleotide
  modified_base 11: mod_base = OTHER; note = 2'-fluoro modified nucleotide
  modified_base 12: mod_base = OTHER; note = 2'-O-methyl modified nucleotide
  modified_base 13: mod_base = OTHER; note = 2'-O-methyl modified nucleotide
  modified_base 14: mod_base = OTHER; note = 2'-O-methyl modified nucleotide
  modified_base 15: mod_base = OTHER; note = 2'-O-methyl modified nucleotide
  modified_base 16: mod_base = OTHER; note = 2'-O-methyl modified nucleotide
  modified_base 17: mod_base = OTHER; note = 2'-O-methyl modified nucleotide
  modified_base 18: mod_base = OTHER; note = 2'-O-methyl modified nucleotide
  modified_base 19: mod_base = OTHER; note = 2'-O-methyl modified nucleotide
  modified_base 20: mod_base = OTHER; note = 2'-O-methyl modified nucleotide
  modified_base 21: mod_base = OTHER; note = 2'-O-methyl modified nucleotide
cctcctctacatgattttcca

SEQ ID NO: 151 - RNA, 21 nt, synthetic construct
  source 1..21: mol_type = other RNA
  modified_base 1: mod_base = OTHER; note = 2'-O-methyl modified nucleotide with phosphorothioate linkage
  modified_base 2: mod_base = OTHER; note = 2'-O-methyl modified nucleotide with phosphorothioate linkage
  modified_base 3: mod_base = OTHER; note = 2'-O-methyl modified nucleotide
  modified_base 4: mod_base = OTHER; note = 2'-O-methyl modified nucleotide
  modified_base 5: mod_base = OTHER; note = 2'-O-methyl modified nucleotide
  modified_base 6: mod_base = OTHER; note = 2'-O-methyl modified nucleotide
  modified_base 7: mod_base = OTHER; note = 2'-fluoro modified nucleotide
  modified_base 8: mod_base = OTHER; note = 2'-O-methyl modified nucleotide
  modified_base 9: mod_base = OTHER; note = 2'-fluoro modified nucleotide
  modified_base 10: mod_base = OTHER; note = 2'-fluoro modified nucleotide
  modified_base 11: mod_base = OTHER; note = 2'-fluoro modified nucleotide
  modified_base 12: mod_base = OTHER; note = 2'-O-methyl modified nucleotide
  modified_base 13: mod_base = OTHER; note = 2'-O-methyl modified nucleotide
  modified_base 14: mod_base = OTHER; note = 2'-O-methyl modified nucleotide
  modified_base 15: mod_base = OTHER; note = 2'-O-methyl modified nucleotide
  modified_base 16: mod_base = OTHER; note = 2'-fluoro modified nucleotide
  modified_base 17: mod_base = OTHER; note = 2'-O-methyl modified nucleotide
  modified_base 18: mod_base = OTHER; note = 2'-O-methyl modified nucleotide
  modified_base 19: mod_base = OTHER; note = 2'-fluoro modified nucleotide
  modified_base 20: mod_base = OTHER; note = 2'-O-methyl modified nucleotide
  modified_base 21: mod_base = OTHER; note = 2'-O-methyl modified nucleotide
caagatcaaggctcacttata

SEQ ID NO: 152 - RNA, 21 nt, synthetic construct
  source 1..21: mol_type = other RNA
  modified_base 1: mod_base = OTHER; note = 2'-O-methyl modified nucleotide with phosphorothioate linkage
  modified_base 2: mod_base = OTHER; note = 2'-O-methyl modified nucleotide with phosphorothioate linkage
  modified_base 3: mod_base = OTHER; note = 2'-O-methyl modified nucleotide
  modified_base 4: mod_base = OTHER; note = 2'-O-methyl modified nucleotide
  modified_base 5: mod_base = OTHER; note = 2'-O-methyl modified nucleotide
  modified_base 6: mod_base = OTHER; note = 2'-O-methyl modified nucleotide
  modified_base 7: mod_base = OTHER; note = 2'-fluoro modified nucleotide
  modified_base 8: mod_base = OTHER; note = 2'-O-methyl modified nucleotide
  modified_base 9: mod_base = OTHER; note = 2'-fluoro modified nucleotide
  modified_base 10: mod_base = OTHER; note = 2'-fluoro modified nucleotide
  modified_base 11: mod_base = OTHER; note = 2'-fluoro modified nucleotide
  modified_base 12: mod_base = OTHER; note = 2'-O-methyl modified nucleotide
  modified_base 13: mod_base = OTHER; note = 2'-O-methyl modified nucleotide
  modified_base 14: mod_base = OTHER; note = 2'-O-methyl modified nucleotide
  modified_base 15: mod_base = OTHER; note = 2'-O-methyl modified nucleotide
  modified_base 16: mod_base = OTHER; note = 2'-fluoro modified nucleotide
  modified_base 17: mod_base = OTHER; note = 2'-O-methyl modified nucleotide
  modified_base 18: mod_base = OTHER; note = 2'-O-methyl modified nucleotide
  modified_base 19: mod_base = OTHER; note = 2'-fluoro modified nucleotide
  modified_base 20: mod_base = OTHER; note = 2'-O-methyl modified nucleotide
  modified_base 21: mod_base = OTHER; note = 2'-O-methyl modified nucleotide
cctcagcattgtgatgaccaa

SEQ ID NO: 153 - RNA, 21 nt, synthetic construct
  source 1..21: mol_type = other RNA
  modified_base 1: mod_base = OTHER; note = 2'-O-methyl modified nucleotide with phosphorothioate linkage
  modified_base 2: mod_base = OTHER; note = 2'-O-methyl modified nucleotide with phosphorothioate linkage
  modified_base 3: mod_base = OTHER; note = 2'-O-methyl modified nucleotide
  modified_base 4: mod_base = OTHER; note = 2'-O-methyl modified nucleotide
  modified_base 5: mod_base = OTHER; note = 2'-O-methyl modified nucleotide
  modified_base 6: mod_base = OTHER; note = 2'-O-methyl modified nucleotide
  modified_base 7: mod_base = OTHER; note = 2'-fluoro modified nucleotide
  modified_base 8: mod_base = OTHER; note = 2'-O-methyl modified nucleotide
  modified_base 9: mod_base = OTHER; note = 2'-fluoro modified nucleotide
  modified_base 10: mod_base = OTHER; note = 2'-fluoro modified nucleotide
  modified_base 11: mod_base = OTHER; note = 2'-fluoro modified nucleotide
  modified_base 12: mod_base = OTHER; note = 2'-O-methyl modified nucleotide
  modified_base 13: mod_base = OTHER; note = 2'-O-methyl modified nucleotide
  modified_base 14: mod_base = OTHER; note = 2'-O-methyl modified nucleotide
  modified_base 15: mod_base = OTHER; note = 2'-O-methyl modified nucleotide
  modified_base 16: mod_base = OTHER; note = 2'-fluoro modified nucleotide
  modified_base 17: mod_base = OTHER; note = 2'-O-methyl modified nucleotide
  modified_base 18: mod_base = OTHER; note = 2'-O-methyl modified nucleotide
  modified_base 19: mod_base = OTHER; note = 2'-fluoro modified nucleotide
  modified_base 20: mod_base = OTHER; note = 2'-O-methyl modified nucleotide
  modified_base 21: mod_base = OTHER; note = 2'-O-methyl modified nucleotide
gatcatcattctcttgtgcaa

SEQ ID NO: 154 - RNA, 21 nt, synthetic construct
  source 1..21: mol_type = other RNA
  modified_base 1: mod_base = OTHER; note = 2'-O-methyl modified nucleotide with phosphorothioate linkage
  modified_base 2: mod_base = OTHER; note = 2'-O-methyl modified nucleotide with phosphorothioate linkage
  modified_base 3: mod_base = OTHER; note = 2'-O-methyl modified nucleotide
  modified_base 4: mod_base = OTHER; note = 2'-O-methyl modified nucleotide
  modified_base 5: mod_base = OTHER; note = 2'-O-methyl modified nucleotide
  modified_base 6: mod_base = OTHER; note = 2'-O-methyl modified nucleotide
  modified_base 7: mod_base = OTHER; note = 2'-fluoro modified nucleotide
  modified_base 8: mod_base = OTHER; note = 2'-O-methyl modified nucleotide
  modified_base 9: mod_base = OTHER; note = 2'-fluoro modified nucleotide
  modified_base 10: mod_base = OTHER; note = 2'-fluoro modified nucleotide
  modified_base 11: mod_base = OTHER; note = 2'-fluoro modified nucleotide
  modified_base 12: mod_base = OTHER; note = 2'-O-methyl modified nucleotide
  modified_base 13: mod_base = OTHER; note = 2'-O-methyl modified nucleotide
  modified_base 14: mod_base = OTHER; note = 2'-O-methyl modified nucleotide
  modified_base 15: mod_base = OTHER; note = 2'-O-methyl modified nucleotide
  modified_base 16: mod_base = OTHER; note = 2'-fluoro modified nucleotide
  modified_base 17: mod_base = OTHER; note = 2'-O-methyl modified nucleotide
  modified_base 18: mod_base = OTHER; note = 2'-O-methyl modified nucleotide
  modified_base 19: mod_base = OTHER; note = 2'-fluoro modified nucleotide
  modified_base 20: mod_base = OTHER; note = 2'-O-methyl modified nucleotide
  modified_base 21: mod_base = OTHER; note = 2'-O-methyl modified nucleotide
tgtggccgtcacagttctcta

SEQ ID NO: 155 - RNA, 21 nt, synthetic construct
  source 1..21: mol_type = other RNA
  modified_base 1: mod_base = OTHER; note = 2'-O-methyl modified nucleotide with phosphorothioate linkage
  modified_base 2: mod_base = OTHER; note = 2'-O-methyl modified nucleotide with phosphorothioate linkage
  modified_base 3: mod_base = OTHER; note = 2'-O-methyl modified nucleotide
  modified_base 4: mod_base = OTHER; note = 2'-O-methyl modified nucleotide
  modified_base 5: mod_base = OTHER; note = 2'-O-methyl modified nucleotide
  modified_base 6: mod_base = OTHER; note = 2'-O-methyl modified nucleotide
  modified_base 7: mod_base = OTHER; note = 2'-fluoro modified nucleotide
  modified_base 8: mod_base = OTHER; note = 2'-O-methyl modified nucleotide
  modified_base 9: mod_base = OTHER; note = 2'-fluoro modified nucleotide
  modified_base 10: mod_base = OTHER; note = 2'-fluoro modified nucleotide
  modified_base 11: mod_base = OTHER; note = 2'-fluoro modified nucleotide
  modified_base 12: mod_base = OTHER; note = 2'-O-methyl modified nucleotide
  modified_base 13: mod_base = OTHER; note = 2'-O-methyl modified nucleotide
  modified_base 14: mod_base = OTHER; note = 2'-O-methyl modified nucleotide
  modified_base 15: mod_base = OTHER; note = 2'-O-methyl modified nucleotide
  modified_base 16: mod_base = OTHER; note = 2'-fluoro modified nucleotide
  modified_base 17: mod_base = OTHER; note = 2'-O-methyl modified nucleotide
  modified_base 18: mod_base = OTHER; note = 2'-O-methyl modified nucleotide
  modified_base 19: mod_base = OTHER; note = 2'-fluoro modified nucleotide
  modified_base 20: mod_base = OTHER; note = 2'-O-methyl modified nucleotide
  modified_base 21: mod_base = OTHER; note = 2'-O-methyl modified nucleotide
tctggtcccaaagcaattcta

SEQ ID NO: 156 - RNA, 21 nt, synthetic construct
  source 1..21: mol_type = other RNA
  modified_base 1: mod_base = OTHER; note = 2'-O-methyl modified nucleotide with phosphorothioate linkage
  modified_base 2: mod_base = OTHER; note = 2'-O-methyl modified nucleotide with phosphorothioate linkage
  modified_base 3: mod_base = OTHER; note = 2'-O-methyl modified nucleotide
  modified_base 4: mod_base = OTHER; note = 2'-O-methyl modified nucleotide
  modified_base 5: mod_base = OTHER; note = 2'-O-methyl modified nucleotide
  modified_base 6: mod_base = OTHER; note = 2'-O-methyl modified nucleotide
  modified_base 7: mod_base = OTHER; note = 2'-fluoro modified nucleotide
  modified_base 8: mod_base = OTHER; note = 2'-O-methyl modified nucleotide
  modified_base 9: mod_base = OTHER; note = 2'-fluoro modified nucleotide
  modified_base 10: mod_base = OTHER; note = 2'-fluoro modified nucleotide
  modified_base 11: mod_base = OTHER; note = 2'-fluoro modified nucleotide
  modified_base 12: mod_base = OTHER; note = 2'-O-methyl modified nucleotide
  modified_base 13: mod_base = OTHER; note = 2'-O-methyl modified nucleotide
  modified_base 14: mod_base = OTHER; note = 2'-O-methyl modified nucleotide
  modified_base 15: mod_base = OTHER; note = 2'-O-methyl modified nucleotide
  modified_base 16: mod_base = OTHER; note = 2'-fluoro modified nucleotide
  modified_base 17: mod_base = OTHER; note = 2'-O-methyl modified nucleotide
  modified_base 18: mod_base = OTHER; note = 2'-O-methyl modified nucleotide
  modified_base 19: mod_base = OTHER; note = 2'-fluoro modified nucleotide
  modified_base 20: mod_base = OTHER; note = 2'-O-methyl modified nucleotide
  modified_base 21: mod_base = OTHER; note = 2'-O-methyl modified nucleotide
tttccagtacatctatcagaa

SEQ ID NO: 157 - RNA, 21 nt, synthetic construct
  source 1..21: mol_type = other RNA
  modified_base 1: mod_base = OTHER; note = 2'-O-methyl modified nucleotide with phosphorothioate linkage
  modified_base 2: mod_base = OTHER; note = 2'-O-methyl modified nucleotide with phosphorothioate linkage
  modified_base 3: mod_base = OTHER; note = 2'-O-methyl modified nucleotide
  modified_base 4: mod_base = OTHER; note = 2'-O-methyl modified nucleotide
  modified_base 5: mod_base = OTHER; note = 2'-O-methyl modified nucleotide
  modified_base 6: mod_base = OTHER; note = 2'-O-methyl modified nucleotide
  modified_base 7: mod_base = OTHER; note = 2'-fluoro modified nucleotide
  modified_base 8: mod_base = OTHER; note = 2'-O-methyl modified nucleotide
  modified_base 9: mod_base = OTHER; note = 2'-fluoro modified nucleotide
  modified_base 10: mod_base = OTHER; note = 2'-fluoro modified nucleotide
  modified_base 11: mod_base = OTHER; note = 2'-fluoro modified nucleotide
  modified_base 12: mod_base = OTHER; note = 2'-O-methyl modified nucleotide
  modified_base 13: mod_base = OTHER; note = 2'-O-methyl modified nucleotide
  modified_base 14: mod_base = OTHER; note = 2'-O-methyl modified nucleotide
  modified_base 15: mod_base = OTHER; note = 2'-O-methyl modified nucleotide
  modified_base 16: mod_base = OTHER; note = 2'-fluoro modified nucleotide
  modified_base 17: mod_base = OTHER; note = 2'-O-methyl modified nucleotide
  modified_base 18: mod_base = OTHER; note = 2'-O-methyl modified nucleotide
  modified_base 19: mod_base = OTHER; note = 2'-fluoro modified nucleotide
  modified_base 20: mod_base = OTHER; note = 2'-O-methyl modified nucleotide
  modified_base 21: mod_base = OTHER; note = 2'-O-methyl modified nucleotide
ttccagtacatctatcagaaa

SEQ ID NO: 158 - RNA, 21 nt, synthetic construct
  source 1..21: mol_type = other RNA
  modified_base 1: mod_base = OTHER; note = 2'-O-methyl modified nucleotide with phosphorothioate linkage
  modified_base 2: mod_base = OTHER; note = 2'-O-methyl modified nucleotide with phosphorothioate linkage
  modified_base 3: mod_base = OTHER; note = 2'-O-methyl modified nucleotide
  modified_base 4: mod_base = OTHER; note = 2'-O-methyl modified nucleotide
  modified_base 5: mod_base = OTHER; note = 2'-O-methyl modified nucleotide
  modified_base 6: mod_base = OTHER; note = 2'-O-methyl modified nucleotide
  modified_base 7: mod_base = OTHER; note = 2'-fluoro modified nucleotide
  modified_base 8: mod_base = OTHER; note = 2'-O-methyl modified nucleotide
  modified_base 9: mod_base = OTHER; note = 2'-fluoro modified nucleotide
  modified_base 10: mod_base = OTHER; note = 2'-fluoro modified nucleotide
  modified_base 11: mod_base = OTHER; note = 2'-fluoro modified nucleotide
  modified_base 12: mod_base = OTHER; note = 2'-O-methyl modified nucleotide
  modified_base 13: mod_base = OTHER; note = 2'-O-methyl modified nucleotide
  modified_base 14: mod_base = OTHER; note = 2'-O-methyl modified nucleotide
  modified_base 15: mod_base = OTHER; note = 2'-O-methyl modified nucleotide
  modified_base 16: mod_base = OTHER; note = 2'-fluoro modified nucleotide
  modified_base 17: mod_base = OTHER; note = 2'-O-methyl modified nucleotide
  modified_base 18: mod_base = OTHER; note = 2'-O-methyl modified nucleotide
  modified_base 19: mod_base = OTHER; note = 2'-fluoro modified nucleotide
  modified_base 20: mod_base = OTHER; note = 2'-O-methyl modified nucleotide
  modified_base 21: mod_base = OTHER; note = 2'-O-methyl modified nucleotide
acatctatcagaatcatcaaa

SEQ ID NO: 159 - RNA, 21 nt, synthetic construct
  source 1..21: mol_type = other RNA
  modified_base 1: mod_base = OTHER; note = 2'-O-methyl modified nucleotide with phosphorothioate linkage
  modified_base 2: mod_base = OTHER; note = 2'-O-methyl modified nucleotide with phosphorothioate linkage
  modified_base 3: mod_base = OTHER; note = 2'-O-methyl modified nucleotide
  modified_base 4: mod_base = OTHER; note = 2'-O-methyl modified nucleotide
  modified_base 5: mod_base = OTHER; note = 2'-O-methyl modified nucleotide
  modified_base 6: mod_base = OTHER; note = 2'-O-methyl modified nucleotide
  modified_base 7: mod_base = OTHER; note = 2'-fluoro modified nucleotide
  modified_base 8: mod_base = OTHER; note = 2'-O-methyl modified nucleotide
  modified_base 9: mod_base = OTHER; note = 2'-fluoro modified nucleotide
  modified_base 10: mod_base = OTHER; note = 2'-fluoro modified nucleotide
  modified_base 11: mod_base = OTHER; note = 2'-fluoro modified nucleotide
  modified_base 12: mod_base = OTHER; note = 2'-O-methyl modified nucleotide
  modified_base 13: mod_base = OTHER; note = 2'-O-methyl modified nucleotide
  modified_base 14: mod_base = OTHER; note = 2'-O-methyl modified nucleotide
  modified_base 15: mod_base = OTHER; note = 2'-O-methyl modified nucleotide
  modified_base 16: mod_base = OTHER; note = 2'-fluoro modified nucleotide
  modified_base 17: mod_base = OTHER; note = 2'-O-methyl modified nucleotide
  modified_base 18: mod_base = OTHER; note = 2'-O-methyl modified nucleotide
  modified_base 19: mod_base = OTHER; note = 2'-fluoro modified nucleotide
  modified_base 20: mod_base = OTHER; note = 2'-O-methyl modified nucleotide
  modified_base 21: mod_base = OTHER; note = 2'-O-methyl modified nucleotide
taaagtcactcaattcctgaa

SEQ ID NO: 160 - RNA, 21 nt, synthetic construct
  source 1..21: mol_type = other RNA
  modified_base 1: mod_base = OTHER; note = 2'-O-methyl modified nucleotide with phosphorothioate linkage
  modified_base 2: mod_base = OTHER; note = 2'-O-methyl modified nucleotide with phosphorothioate linkage
  modified_base 3: mod_base = OTHER; note = 2'-O-methyl modified nucleotide
  modified_base 4: mod_base = OTHER; note = 2'-O-methyl modified nucleotide
  modified_base 5: mod_base = OTHER; note = 2'-O-methyl modified nucleotide
  modified_base 6: mod_base = OTHER; note = 2'-O-methyl modified nucleotide
  modified_base 7: mod_base = OTHER; note = 2'-fluoro modified nucleotide
  modified_base 8: mod_base = OTHER; note = 2'-O-methyl modified nucleotide
  modified_base 9: mod_base = OTHER; note = 2'-fluoro modified nucleotide
  modified_base 10: mod_base = OTHER; note = 2'-fluoro modified nucleotide
  modified_base 11: mod_base = OTHER; note = 2'-fluoro modified nucleotide
  modified_base 12: mod_base = OTHER; note = 2'-O-methyl modified nucleotide
  modified_base 13: mod_base = OTHER; note = 2'-O-methyl modified nucleotide
  modified_base 14: mod_base = OTHER; note = 2'-O-methyl modified nucleotide
  modified_base 15: mod_base = OTHER; note = 2'-O-methyl modified nucleotide
  modified_base 16: mod_base = OTHER; note = 2'-fluoro modified nucleotide
  modified_base 17: mod_base = OTHER; note = 2'-O-methyl modified nucleotide
  modified_base 18: mod_base = OTHER; note = 2'-O-methyl modified nucleotide
  modified_base 19: mod_base = OTHER; note = 2'-fluoro modified nucleotide
  modified_base 20: mod_base = OTHER; note = 2'-O-methyl modified nucleotide
  modified_base 21: mod_base = OTHER; note = 2'-O-methyl modified nucleotide
ttcctgaactaatcaatataa

SEQ ID NO: 161 - RNA, 21 nt, synthetic construct
  source 1..21: mol_type = other RNA
  modified_base 1: mod_base = OTHER; note = 2'-O-methyl modified nucleotide with phosphorothioate linkage
  modified_base 2: mod_base = OTHER; note = 2'-O-methyl modified nucleotide with phosphorothioate linkage
  modified_base 3: mod_base = OTHER; note = 2'-O-methyl modified nucleotide
  modified_base 4: mod_base = OTHER; note = 2'-O-methyl modified nucleotide
  modified_base 5: mod_base = OTHER; note = 2'-O-methyl modified nucleotide
  modified_base 6: mod_base = OTHER; note = 2'-O-methyl modified nucleotide
  modified_base 7: mod_base = OTHER; note = 2'-fluoro modified nucleotide
  modified_base 8: mod_base = OTHER; note = 2'-O-methyl modified nucleotide
  modified_base 9: mod_base = OTHER; note = 2'-fluoro modified nucleotide
  modified_base 10: mod_base = OTHER; note = 2'-fluoro modified nucleotide
  modified_base 11: mod_base = OTHER; note = 2'-fluoro modified nucleotide
  modified_base 12: mod_base = OTHER; note = 2'-O-methyl modified nucleotide
  modified_base 13: mod_base = OTHER; note = 2'-O-methyl modified nucleotide
  modified_base 14: mod_base = OTHER; note = 2'-O-methyl modified nucleotide
  modified_base 15: mod_base = OTHER; note = 2'-O-methyl modified nucleotide
  modified_base 16: mod_base = OTHER; note = 2'-fluoro modified nucleotide
  modified_base 17: mod_base = OTHER; note = 2'-O-methyl modified nucleotide
  modified_base 18: mod_base = OTHER; note = 2'-O-methyl modified nucleotide
  modified_base 19: mod_base = OTHER; note = 2'-fluoro modified nucleotide
  modified_base 20: mod_base = OTHER; note = 2'-O-methyl modified nucleotide
  modified_base 21: mod_base = OTHER; note = 2'-O-methyl modified nucleotide
cctgaactaatcaatatataa

SEQ ID NO: 162 - RNA, 21 nt, synthetic construct
  source 1..21: mol_type = other RNA
  modified_base 1: mod_base = OTHER; note = 2'-O-methyl modified nucleotide with phosphorothioate linkage
  modified_base 2: mod_base = OTHER; note = 2'-O-methyl modified nucleotide with phosphorothioate linkage
  modified_base 3: mod_base = OTHER; note = 2'-O-methyl modified nucleotide
  modified_base 4: mod_base = OTHER; note = 2'-O-methyl modified nucleotide
  modified_base 5: mod_base = OTHER; note = 2'-O-methyl modified nucleotide
  modified_base 6: mod_base = OTHER; note = 2'-O-methyl modified nucleotide
  modified_base 7: mod_base = OTHER; note = 2'-fluoro modified nucleotide
  modified_base 8: mod_base = OTHER; note = 2'-O-methyl modified nucleotide
  modified_base 9: mod_base = OTHER; note = 2'-fluoro modified nucleotide
  modified_base 10: mod_base = OTHER; note = 2'-fluoro modified nucleotide
  modified_base 11: mod_base = OTHER; note = 2'-fluoro modified nucleotide
  modified_base 12: mod_base = OTHER; note = 2'-O-methyl modified nucleotide
  modified_base 13: mod_base = OTHER; note = 2'-O-methyl modified nucleotide
  modified_base 14: mod_base = OTHER; note = 2'-O-methyl modified nucleotide
  modified_base 15: mod_base = OTHER; note = 2'-O-methyl modified nucleotide
  modified_base 16: mod_base = OTHER; note = 2'-fluoro modified nucleotide
  modified_base 17: mod_base = OTHER; note = 2'-O-methyl modified nucleotide
  modified_base 18: mod_base = OTHER; note = 2'-O-methyl modified nucleotide
  modified_base 19: mod_base = OTHER; note = 2'-fluoro modified nucleotide
  modified_base 20: mod_base = OTHER; note = 2'-O-methyl modified nucleotide
  modified_base 21: mod_base = OTHER; note = 2'-O-methyl modified nucleotide
cctggttctcattccttgcaa

SEQ ID NO: 163 - RNA, 21 nt, synthetic construct
  source 1..21: mol_type = other RNA
  modified_base 1: mod_base = OTHER; note = 2'-O-methyl modified nucleotide with phosphorothioate linkage
  modified_base 2: mod_base = OTHER; note = 2'-O-methyl modified nucleotide with phosphorothioate linkage
  modified_base 3: mod_base = OTHER; note = 2'-O-methyl modified nucleotide
  modified_base 4: mod_base = OTHER; note = 2'-O-methyl modified nucleotide
  modified_base 5: mod_base = OTHER; note = 2'-O-methyl modified nucleotide
  modified_base 6: mod_base = OTHER; note = 2'-O-methyl modified nucleotide
  modified_base 7: mod_base = OTHER; note = 2'-fluoro modified nucleotide
  modified_base 8: mod_base = OTHER; note = 2'-O-methyl modified nucleotide
  modified_base 9: mod_base = OTHER; note = 2'-fluoro modified nucleotide
  modified_base 10: mod_base = OTHER; note = 2'-fluoro modified nucleotide
  modified_base 11: mod_base = OTHER; note = 2'-fluoro modified nucleotide
  modified_base 12: mod_base = OTHER; note = 2'-O-methyl modified nucleotide
  modified_base 13: mod_base = OTHER; note = 2'-O-methyl modified nucleotide
  modified_base 14: mod_base = OTHER; note = 2'-O-methyl modified nucleotide
  modified_base 15: mod_base = OTHER; note = 2'-O-methyl modified nucleotide
  modified_base 16: mod_base = OTHER; note = 2'-fluoro modified nucleotide
  modified_base 17: mod_base = OTHER; note = 2'-O-methyl modified nucleotide
  modified_base 18: mod_base = OTHER; note = 2'-O-methyl modified nucleotide
  modified_base 19: mod_base = OTHER; note = 2'-fluoro modified nucleotide
  modified_base 20: mod_base = OTHER; note = 2'-O-methyl modified nucleotide
  modified_base 21: mod_base = OTHER; note = 2'-O-methyl modified nucleotide
ttctcattccttgcaccataa

SEQ ID NO: 164 - RNA, 21 nt, synthetic construct
  source 1..21: mol_type = other RNA
  modified_base 1: mod_base = OTHER; note = 2'-O-methyl modified nucleotide with phosphorothioate linkage
  modified_base 2: mod_base = OTHER; note = 2'-O-methyl modified nucleotide with phosphorothioate linkage
  modified_base 3: mod_base = OTHER; note = 2'-O-methyl modified nucleotide
  modified_base 4: mod_base = OTHER; note = 2'-O-methyl modified nucleotide
  modified_base 5: mod_base = OTHER; note = 2'-O-methyl modified nucleotide
  modified_base 6: mod_base = OTHER; note = 2'-O-methyl modified nucleotide
  modified_base 7: mod_base = OTHER; note = 2'-fluoro modified nucleotide
  modified_base 8: mod_base = OTHER; note = 2'-O-methyl modified nucleotide
  modified_base 9: mod_base = OTHER; note = 2'-fluoro modified nucleotide
  modified_base 10: mod_base = OTHER; note = 2'-fluoro modified nucleotide
  modified_base 11: mod_base = OTHER; note = 2'-fluoro modified nucleotide
  modified_base 12: mod_base = OTHER; note = 2'-O-methyl modified nucleotide
  modified_base 13: mod_base = OTHER; note = 2'-O-methyl modified nucleotide
  modified_base 14: mod_base = OTHER; note = 2'-O-methyl modified nucleotide
  modified_base 15: mod_base = OTHER; note = 2'-O-methyl modified nucleotide
  modified_base 16: mod_base = OTHER; note = 2'-fluoro modified nucleotide
  modified_base 17: mod_base = OTHER; note = 2'-O-methyl modified nucleotide
  modified_base 18: mod_base = OTHER; note = 2'-O-methyl modified nucleotide
  modified_base 19: mod_base = OTHER; note = 2'-fluoro modified nucleotide
  modified_base 20: mod_base = OTHER; note = 2'-O-methyl modified nucleotide
  modified_base 21: mod_base = OTHER; note = 2'-O-methyl modified nucleotide
tattggctttctgctgggtta

SEQ ID NO: 165 - RNA, 21 nt, synthetic construct
  source 1..21: mol_type = other RNA
  modified_base 1: mod_base = OTHER; note = 2'-O-methyl modified nucleotide with phosphorothioate linkage
  modified_base 2: mod_base = OTHER; note = 2'-O-methyl modified nucleotide with phosphorothioate linkage
  modified_base 3: mod_base = OTHER; note = 2'-O-methyl modified nucleotide
  modified_base 4: mod_base = OTHER; note = 2'-O-methyl modified nucleotide
  modified_base 5: mod_base = OTHER; note = 2'-O-methyl modified nucleotide
  modified_base 6: mod_base = OTHER; note = 2'-O-methyl modified nucleotide
  modified_base 7: mod_base = OTHER; note = 2'-fluoro modified nucleotide
  modified_base 8: mod_base = OTHER; note = 2'-O-methyl modified nucleotide
  modified_base 9: mod_base = OTHER; note = 2'-fluoro modified nucleotide
  modified_base 10: mod_base = OTHER; note = 2'-fluoro modified nucleotide
  modified_base 11: mod_base = OTHER; note = 2'-fluoro modified nucleotide
  modified_base 12: mod_base = OTHER; note = 2'-O-methyl modified nucleotide
  modified_base 13: mod_base = OTHER; note = 2'-O-methyl modified nucleotide
  modified_base 14: mod_base = OTHER; note = 2'-O-methyl modified nucleotide
  modified_base 15: mod_base = OTHER; note = 2'-O-methyl modified nucleotide
  modified_base 16: mod_base = OTHER; note = 2'-fluoro modified nucleotide
  modified_base 17: mod_base = OTHER; note = 2'-O-methyl modified nucleotide
  modified_base 18: mod_base = OTHER; note = 2'-O-methyl modified nucleotide
  modified_base 19: mod_base = OTHER; note = 2'-fluoro modified nucleotide
  modified_base 20: mod_base = OTHER; note = 2'-O-methyl modified nucleotide
  modified_base 21: mod_base = OTHER; note = 2'-O-methyl modified nucleotide
cctcctctacatgattttcca

SEQ ID NO: 166 - RNA, 21 nt, synthetic construct
  source 1..21: mol_type = other RNA
  modified_base 1: mod_base = OTHER; note = 2'-O-methyl modified nucleotide with phosphorothioate linkage
  modified_base 2: mod_base = OTHER; note = 2'-O-methyl modified nucleotide with phosphorothioate linkage
  modified_base 3: mod_base = OTHER; note = 2'-O-methyl modified nucleotide
  modified_base 4: mod_base = OTHER; note = 2'-O-methyl modified nucleotide
  modified_base 5: mod_base = OTHER; note = 2'-O-methyl modified nucleotide
  modified_base 6: mod_base = OTHER; note = 2'-O-methyl modified nucleotide
  modified_base 7: mod_base = OTHER; note = 2'-fluoro modified nucleotide
  modified_base 8: mod_base = OTHER; note = 2'-O-methyl modified nucleotide
  modified_base 9: mod_base = OTHER; note = 2'-fluoro modified nucleotide
  modified_base 10: mod_base = OTHER; note = 2'-fluoro modified nucleotide
  modified_base 11: mod_base = OTHER; note = 2'-fluoro modified nucleotide
  modified_base 12: mod_base = OTHER; note = 2'-O-methyl modified nucleotide
  modified_base 13: mod_base = OTHER; note = 2'-O-methyl modified nucleotide
  modified_base 14: mod_base = OTHER; note = 2'-O-methyl modified nucleotide
  modified_base 15: mod_base = OTHER; note = 2'-O-methyl modified nucleotide
  modified_base 16: mod_base = OTHER; note = 2'-O-methyl modified nucleotide
  modified_base 17: mod_base = OTHER; note = 2'-O-methyl modified nucleotide
  modified_base 18: mod_base = OTHER; note = 2'-O-methyl modified nucleotide
  modified_base 19: mod_base = OTHER; note = 2'-O-methyl modified nucleotide
  modified_base 20: mod_base = OTHER; note = 2'-O-methyl modified nucleotide
  modified_base 21: mod_base = OTHER; note = 2'-O-methyl modified nucleotide
caagatcaaggctcacttata

SEQ ID NO: 167 - RNA, 21 nt, synthetic construct
  source 1..21: mol_type = other RNA
  modified_base 1: mod_base = OTHER; note = 2'-O-methyl modified nucleotide with phosphorothioate linkage
  modified_base 2: mod_base = OTHER; note = 2'-O-methyl modified nucleotide with phosphorothioate linkage
  modified_base 3: mod_base = OTHER; note = 2'-O-methyl modified nucleotide
  modified_base 4: mod_base = OTHER; note = 2'-O-methyl modified nucleotide
  modified_base 5: mod_base = OTHER; note = 2'-O-methyl modified nucleotide
  modified_base 6: mod_base = OTHER; note = 2'-O-methyl modified nucleotide
  modified_base 7: mod_base = OTHER; note = 2'-fluoro modified nucleotide
  modified_base 8: mod_base = OTHER; note = 2'-O-methyl modified nucleotide
  modified_base 9: mod_base = OTHER; note = 2'-fluoro modified nucleotide
  modified_base 10: mod_base = OTHER; note = 2'-fluoro modified nucleotide
  modified_base 11: mod_base = OTHER; note = 2'-fluoro modified nucleotide
  modified_base 12: mod_base = OTHER; note = 2'-O-methyl modified nucleotide
  modified_base 13: mod_base = OTHER; note = 2'-O-methyl modified nucleotide
  modified_base 14: mod_base = OTHER; note = 2'-O-methyl modified nucleotide
  modified_base 15: mod_base = OTHER; note = 2'-O-methyl modified nucleotide
  modified_base 16: mod_base = OTHER; note = 2'-O-methyl modified nucleotide
  modified_base 17: mod_base = OTHER; note = 2'-O-methyl modified nucleotide
  modified_base 18: mod_base = OTHER; note = 2'-O-methyl modified nucleotide
  modified_base 19: mod_base = OTHER; note = 2'-O-methyl modified nucleotide
  modified_base 20: mod_base = OTHER; note = 2'-O-methyl modified nucleotide
  modified_base 21: mod_base = OTHER; note = 2'-O-methyl modified nucleotide
cctcagcattgtgatgaccaa

SEQ ID NO: 168 - RNA, 21 nt, synthetic construct
  source 1..21: mol_type = other RNA
  modified_base 1: mod_base = OTHER; note = 2'-O-methyl modified nucleotide with phosphorothioate linkage
  modified_base 2: mod_base = OTHER; note = 2'-O-methyl modified nucleotide with phosphorothioate linkage
  modified_base 3: mod_base = OTHER; note = 2'-O-methyl modified nucleotide
  modified_base 4: mod_base = OTHER; note = 2'-O-methyl modified nucleotide
  modified_base 5: mod_base = OTHER; note = 2'-O-methyl modified nucleotide
  modified_base 6: mod_base = OTHER; note = 2'-O-methyl modified nucleotide
  modified_base 7: mod_base = OTHER; note = 2'-fluoro modified nucleotide
  modified_base 8: mod_base = OTHER; note = 2'-O-methyl modified nucleotide
  modified_base 9: mod_base = OTHER; note = 2'-fluoro modified nucleotide
  modified_base 10: mod_base = OTHER; note = 2'-fluoro modified nucleotide
  modified_base 11: mod_base = OTHER; note = 2'-fluoro modified nucleotide
  modified_base 12: mod_base = OTHER; note = 2'-O-methyl modified nucleotide
  modified_base 13: mod_base = OTHER; note = 2'-O-methyl modified nucleotide
  modified_base 14: mod_base = OTHER; note = 2'-O-methyl modified nucleotide
  modified_base 15: mod_base = OTHER; note = 2'-O-methyl modified nucleotide
  modified_base 16: mod_base = OTHER; note = 2'-O-methyl modified nucleotide
  modified_base 17: mod_base = OTHER; note = 2'-O-methyl modified nucleotide
  modified_base 18: mod_base = OTHER; note = 2'-O-methyl modified nucleotide
  modified_base 19: mod_base = OTHER; note = 2'-O-methyl modified nucleotide
  modified_base 20: mod_base = OTHER; note = 2'-O-methyl modified nucleotide
  modified_base 21: mod_base = OTHER; note = 2'-O-methyl modified nucleotide
gatcatcattctcttgtgcaa

SEQ ID NO: 169 - RNA, 21 nt, synthetic construct
  source 1..21: mol_type = other RNA
  modified_base 1: mod_base = OTHER; note = 2'-O-methyl modified nucleotide with phosphorothioate linkage
  modified_base 2: mod_base = OTHER; note = 2'-O-methyl modified nucleotide with phosphorothioate linkage
  modified_base 3: mod_base = OTHER; note = 2'-O-methyl modified nucleotide
  modified_base 4: mod_base = OTHER; note = 2'-O-methyl modified nucleotide
  modified_base 5: mod_base = OTHER; note = 2'-O-methyl modified nucleotide
  modified_base 6: mod_base = OTHER; note = 2'-O-methyl modified nucleotide
  modified_base 7: mod_base = OTHER; note = 2'-fluoro modified nucleotide
  modified_base 8: mod_base = OTHER; note = 2'-O-methyl modified nucleotide
  modified_base 9: mod_base = OTHER; note = 2'-fluoro modified nucleotide
  modified_base 10: mod_base = OTHER; note = 2'-fluoro modified nucleotide
  modified_base 11: mod_base = OTHER; note = 2'-fluoro modified nucleotide
  modified_base 12: mod_base = OTHER; note = 2'-O-methyl modified nucleotide
  modified_base 13: mod_base = OTHER; note = 2'-O-methyl modified nucleotide
  modified_base 14: mod_base = OTHER; note = 2'-O-methyl modified nucleotide
  modified_base 15: mod_base = OTHER; note = 2'-O-methyl modified nucleotide
  modified_base 16: mod_base = OTHER; note = 2'-O-methyl modified nucleotide
  modified_base 17: mod_base = OTHER; note = 2'-O-methyl modified nucleotide
  modified_base 18: mod_base = OTHER; note = 2'-O-methyl modified nucleotide
  modified_base 19: mod_base = OTHER; note = 2'-O-methyl modified nucleotide
  modified_base 20: mod_base = OTHER; note = 2'-O-methyl modified nucleotide
  modified_base 21: mod_base = OTHER; note = 2'-O-methyl modified nucleotide
tgtggccgtcacagttctcta

SEQ ID NO: 170 - RNA, 21 nt, synthetic construct
  source 1..21: mol_type = other RNA
  modified_base 1: mod_base = OTHER; note = 2'-O-methyl modified nucleotide with phosphorothioate linkage
  modified_base 2: mod_base = OTHER; note = 2'-O-methyl modified nucleotide with phosphorothioate linkage
  modified_base 3: mod_base = OTHER; note = 2'-O-methyl modified nucleotide
  modified_base 4: mod_base = OTHER; note = 2'-O-methyl modified nucleotide
  modified_base 5: mod_base = OTHER; note = 2'-O-methyl modified nucleotide
  modified_base 6: mod_base = OTHER; note = 2'-O-methyl modified nucleotide
  modified_base 7: mod_base = OTHER; note = 2'-fluoro modified nucleotide
  modified_base 8: mod_base = OTHER; note = 2'-O-methyl modified nucleotide
  modified_base 9: mod_base = OTHER; note = 2'-fluoro modified nucleotide
  modified_base 10: mod_base = OTHER; note = 2'-fluoro modified nucleotide
  modified_base 11: mod_base = OTHER; note = 2'-fluoro modified nucleotide
  modified_base 12: mod_base = OTHER; note = 2'-O-methyl modified nucleotide
  modified_base 13: mod_base = OTHER; note = 2'-O-methyl modified nucleotide
  modified_base 14: mod_base = OTHER; note = 2'-O-methyl modified nucleotide
  modified_base 15: mod_base = OTHER; note = 2'-O-methyl modified nucleotide
  modified_base 16: mod_base = OTHER; note = 2'-O-methyl modified nucleotide
  modified_base 17: mod_base = OTHER; note = 2'-O-methyl modified nucleotide
  modified_base 18: mod_base = OTHER; note = 2'-O-methyl modified nucleotide
  modified_base 19: mod_base = OTHER; note = 2'-O-methyl modified nucleotide
  modified_base 20: mod_base = OTHER; note = 2'-O-methyl modified nucleotide
  modified_base 21: mod_base = OTHER; note = 2'-O-methyl modified nucleotide
tctggtcccaaagcaattcta

SEQ ID NO: 171 - RNA, 21 nt, synthetic construct
  source 1..21: mol_type = other RNA
  modified_base 1: mod_base = OTHER; note = 2'-O-methyl modified nucleotide with phosphorothioate linkage
  modified_base 2: mod_base = OTHER; note = 2'-O-methyl modified nucleotide with phosphorothioate linkage
  modified_base 3: mod_base = OTHER; note = 2'-O-methyl modified nucleotide
  modified_base 4: mod_base = OTHER; note = 2'-O-methyl modified nucleotide
  modified_base 5: mod_base = OTHER; note = 2'-O-methyl modified nucleotide
  modified_base 6: mod_base = OTHER; note = 2'-O-methyl modified nucleotide
  modified_base 7: mod_base = OTHER; note = 2'-fluoro modified nucleotide
  modified_base 8: mod_base = OTHER; note = 2'-O-methyl modified nucleotide
  modified_base 9: mod_base = OTHER; note = 2'-fluoro modified nucleotide
  modified_base 10: mod_base = OTHER; note = 2'-fluoro modified nucleotide
  modified_base 11: mod_base = OTHER; note = 2'-fluoro modified nucleotide
  modified_base 12: mod_base = OTHER; note = 2'-O-methyl modified nucleotide
  modified_base 13: mod_base = OTHER; note = 2'-O-methyl modified nucleotide
  modified_base 14: mod_base = OTHER; note = 2'-O-methyl modified nucleotide
  modified_base 15: mod_base = OTHER; note = 2'-O-methyl modified nucleotide
  modified_base 16: mod_base = OTHER; note = 2'-O-methyl modified nucleotide
  modified_base 17: mod_base = OTHER; note = 2'-O-methyl modified nucleotide
  modified_base 18: mod_base = OTHER; note = 2'-O-methyl modified nucleotide
  modified_base 19: mod_base = OTHER; note = 2'-O-methyl modified nucleotide
  modified_base 20: mod_base = OTHER; note = 2'-O-methyl modified nucleotide
  modified_base 21: mod_base = OTHER; note = 2'-O-methyl modified nucleotide
tttccagtacatctatcagaa

SEQ ID NO: 172 - RNA, 21 nt, synthetic construct
  source 1..21: mol_type = other RNA
  modified_base 1: mod_base = OTHER; note = 2'-O-methyl modified nucleotide with phosphorothioate linkage
  modified_base 2: mod_base = OTHER; note = 2'-O-methyl modified nucleotide with phosphorothioate linkage
  modified_base 3: mod_base = OTHER; note = 2'-O-methyl modified nucleotide
  modified_base 4: mod_base = OTHER; note = 2'-O-methyl modified nucleotide
  modified_base 5: mod_base = OTHER; note = 2'-O-methyl modified nucleotide
  modified_base 6: mod_base = OTHER; note = 2'-O-methyl modified nucleotide
  modified_base 7: mod_base = OTHER; note = 2'-fluoro modified nucleotide
  modified_base 8: mod_base = OTHER; note = 2'-O-methyl modified nucleotide
  modified_base 9: mod_base = OTHER; note = 2'-fluoro modified nucleotide
  modified_base 10: mod_base = OTHER; note = 2'-fluoro modified nucleotide
  modified_base 11: mod_base = OTHER; note = 2'-fluoro modified nucleotide
  modified_base 12: mod_base = OTHER; note = 2'-O-methyl modified nucleotide
  modified_base 13: mod_base = OTHER; note = 2'-O-methyl modified nucleotide
  modified_base 14: mod_base = OTHER; note = 2'-O-methyl modified nucleotide
  modified_base 15: mod_base = OTHER; note = 2'-O-methyl modified nucleotide
  modified_base 16: mod_base = OTHER; note = 2'-O-methyl modified nucleotide
  modified_base 17: mod_base = OTHER; note = 2'-O-methyl modified nucleotide
  modified_base 18: mod_base = OTHER; note = 2'-O-methyl modified nucleotide
  modified_base 19: mod_base = OTHER; note = 2'-O-methyl modified nucleotide
  modified_base 20: mod_base = OTHER; note = 2'-O-methyl modified nucleotide
  modified_base 21: mod_base = OTHER; note = 2'-O-methyl modified nucleotide
ttccagtacatctatcagaaa

SEQ ID NO: 173 - RNA, 21 nt, synthetic construct
  source 1..21: mol_type = other RNA
  modified_base 1: mod_base = OTHER; note = 2'-O-methyl modified nucleotide with phosphorothioate linkage
  modified_base 2: mod_base = OTHER; note = 2'-O-methyl modified nucleotide with phosphorothioate linkage
  modified_base 3: mod_base = OTHER; note = 2'-O-methyl modified nucleotide
  modified_base 4: mod_base = OTHER; note = 2'-O-methyl modified nucleotide
  modified_base 5: mod_base = OTHER; note = 2'-O-methyl modified nucleotide
  modified_base 6: mod_base = OTHER; note = 2'-O-methyl modified nucleotide
  modified_base 7: mod_base = OTHER; note = 2'-fluoro modified nucleotide
  modified_base 8: mod_base = OTHER; note = 2'-O-methyl modified nucleotide
  modified_base 9: mod_base = OTHER; note = 2'-fluoro modified nucleotide
  modified_base 10: mod_base = OTHER; note = 2'-fluoro modified nucleotide
  modified_base 11: mod_base = OTHER; note = 2'-fluoro modified nucleotide
  modified_base 12: mod_base = OTHER; note = 2'-O-methyl modified nucleotide
  modified_base 13: mod_base = OTHER; note = 2'-O-methyl modified nucleotide
  modified_base 14: mod_base = OTHER; note = 2'-O-methyl modified nucleotide
  modified_base 15: mod_base = OTHER; note = 2'-O-methyl modified nucleotide
  modified_base 16: mod_base = OTHER; note = 2'-O-methyl modified nucleotide
  modified_base 17: mod_base = OTHER; note = 2'-O-methyl modified nucleotide
  modified_base 18: mod_base = OTHER; note = 2'-O-methyl modified nucleotide
  modified_base 19: mod_base = OTHER; note = 2'-O-methyl modified nucleotide
  modified_base 20: mod_base = OTHER; note = 2'-O-methyl modified nucleotide
  modified_base 21: mod_base = OTHER; note = 2'-O-methyl modified nucleotide
acatctatcagaatcatcaaa

SEQ ID NO: 174 - RNA, 21 nt, synthetic construct
  source 1..21: mol_type = other RNA
  modified_base 1: mod_base = OTHER; note = 2'-O-methyl modified nucleotide with phosphorothioate linkage
  modified_base 2: mod_base = OTHER; note = 2'-O-methyl modified nucleotide with phosphorothioate linkage
  modified_base 3: mod_base = OTHER; note = 2'-O-methyl modified nucleotide
  modified_base 4: mod_base = OTHER; note = 2'-O-methyl modified nucleotide
  modified_base 5: mod_base = OTHER; note = 2'-O-methyl modified nucleotide
  modified_base 6: mod_base = OTHER; note = 2'-O-methyl modified nucleotide
  modified_base 7: mod_base = OTHER; note = 2'-fluoro modified nucleotide
  modified_base 8: mod_base = OTHER; note = 2'-O-methyl modified nucleotide
  modified_base 9: mod_base = OTHER; note = 2'-fluoro modified nucleotide
  modified_base 10: mod_base = OTHER; note = 2'-fluoro modified nucleotide
  modified_base 11: mod_base = OTHER; note = 2'-fluoro modified nucleotide
  modified_base 12: mod_base = OTHER; note = 2'-O-methyl modified nucleotide
  modified_base 13: mod_base = OTHER; note = 2'-O-methyl modified nucleotide
  modified_base 14: mod_base = OTHER; note = 2'-O-methyl modified nucleotide
  modified_base 15: mod_base = OTHER; note = 2'-O-methyl modified nucleotide
  modified_base 16: mod_base = OTHER; note = 2'-O-methyl modified nucleotide
  modified_base 17: mod_base = OTHER; note = 2'-O-methyl modified nucleotide
  modified_base 18: mod_base = OTHER; note = 2'-O-methyl modified nucleotide
  modified_base 19: mod_base = OTHER; note = 2'-O-methyl modified nucleotide
  modified_base 20: mod_base = OTHER; note = 2'-O-methyl modified nucleotide
  modified_base 21: mod_base = OTHER; note = 2'-O-methyl modified nucleotide
taaagtcactcaattcctgaa

SEQ ID NO: 175 - RNA, 21 nt, synthetic construct
  source 1..21: mol_type = other RNA
  modified_base 1: mod_base = OTHER; note = 2'-O-methyl modified nucleotide with phosphorothioate linkage
  modified_base 2: mod_base = OTHER; note = 2'-O-methyl modified nucleotide with phosphorothioate linkage
  modified_base 3: mod_base = OTHER; note = 2'-O-methyl modified nucleotide
  modified_base 4: mod_base = OTHER; note = 2'-O-methyl modified nucleotide
  modified_base 5: mod_base = OTHER; note = 2'-O-methyl modified nucleotide
  modified_base 6: mod_base = OTHER; note = 2'-O-methyl modified nucleotide
  modified_base 7: mod_base = OTHER; note = 2'-fluoro modified nucleotide
  modified_base 8: mod_base = OTHER; note = 2'-O-methyl modified nucleotide
  modified_base 9: mod_base = OTHER; note = 2'-fluoro modified nucleotide
  modified_base 10: mod_base = OTHER; note = 2'-fluoro modified nucleotide
  modified_base 11: mod_base = OTHER; note = 2'-fluoro modified nucleotide
  modified_base 12: mod_base = OTHER; note = 2'-O-methyl modified nucleotide
  modified_base 13: mod_base = OTHER; note = 2'-O-methyl modified nucleotide
  modified_base 14: mod_base = OTHER; note = 2'-O-methyl modified nucleotide
  modified_base 15: mod_base = OTHER; note = 2'-O-methyl modified nucleotide
  modified_base 16: mod_base = OTHER; note = 2'-O-methyl modified nucleotide
  modified_base 17: mod_base = OTHER; note = 2'-O-methyl modified nucleotide
  modified_base 18: mod_base = OTHER; note = 2'-O-methyl modified nucleotide
  modified_base 19: mod_base = OTHER; note = 2'-O-methyl modified nucleotide
  modified_base 20: mod_base = OTHER; note = 2'-O-methyl modified nucleotide
  modified_base 21: mod_base = OTHER; note = 2'-O-methyl modified nucleotide
ttcctgaactaatcaatataa

SEQ ID NO: 176 - RNA, 21 nt, synthetic construct
  source 1..21: mol_type = other RNA
  modified_base 1: mod_base = OTHER; note = 2'-O-methyl modified nucleotide with phosphorothioate linkage
  modified_base 2: mod_base = OTHER; note = 2'-O-methyl modified nucleotide with phosphorothioate linkage
  modified_base 3: mod_base = OTHER; note = 2'-O-methyl modified nucleotide
  modified_base 4: mod_base = OTHER; note = 2'-O-methyl modified nucleotide
  modified_base 5: mod_base = OTHER; note = 2'-O-methyl modified nucleotide
  modified_base 6: mod_base = OTHER; note = 2'-O-methyl modified nucleotide
  modified_base 7: mod_base = OTHER; note = 2'-fluoro modified nucleotide
  modified_base 8: mod_base = OTHER; note = 2'-O-methyl modified nucleotide
  modified_base 9: mod_base = OTHER; note = 2'-fluoro modified nucleotide
  modified_base 10: mod_base = OTHER; note = 2'-fluoro modified nucleotide
  modified_base 11: mod_base = OTHER; note = 2'-fluoro modified nucleotide
  modified_base 12: mod_base = OTHER; note = 2'-O-methyl modified nucleotide
  modified_base 13: mod_base = OTHER; note = 2'-O-methyl modified nucleotide
  modified_base 14: mod_base = OTHER; note = 2'-O-methyl modified nucleotide
  modified_base 15: mod_base = OTHER; note = 2'-O-methyl modified nucleotide
  modified_base 16: mod_base = OTHER; note = 2'-O-methyl modified nucleotide
  modified_base 17: mod_base = OTHER; note = 2'-O-methyl modified nucleotide
  modified_base 18: mod_base = OTHER; note = 2'-O-methyl modified nucleotide
  modified_base 19: mod_base = OTHER; note = 2'-O-methyl modified nucleotide
  modified_base 20: mod_base = OTHER; note = 2'-O-methyl modified nucleotide
  modified_base 21: mod_base = OTHER; note = 2'-O-methyl modified nucleotide
cctgaactaatcaatatataa

SEQ ID NO: 177 - RNA, 21 nt, synthetic construct
  source 1..21: mol_type = other RNA
  modified_base 1: mod_base = OTHER; note = 2'-O-methyl modified nucleotide with phosphorothioate linkage
  modified_base 2: mod_base = OTHER; note = 2'-O-methyl modified nucleotide with phosphorothioate linkage
  modified_base 3: mod_base = OTHER; note = 2'-O-methyl modified nucleotide
  modified_base 4: mod_base = OTHER; note = 2'-O-methyl modified nucleotide
  modified_base 5: mod_base = OTHER; note = 2'-O-methyl modified nucleotide
  modified_base 6: mod_base = OTHER; note = 2'-O-methyl modified nucleotide
  modified_base 7: mod_base = OTHER; note = 2'-fluoro modified nucleotide
  modified_base 8: mod_base = OTHER; note = 2'-O-methyl modified nucleotide
  modified_base 9: mod_base = OTHER; note = 2'-fluoro modified nucleotide
  modified_base 10: mod_base = OTHER; note = 2'-fluoro modified nucleotide
  modified_base 11: mod_base = OTHER; note = 2'-fluoro modified nucleotide
  modified_base 12: mod_base = OTHER; note = 2'-O-methyl modified nucleotide
  modified_base 13: mod_base = OTHER; note = 2'-O-methyl modified nucleotide
  modified_base 14: mod_base = OTHER; note = 2'-O-methyl modified nucleotide
  modified_base 15: mod_base = OTHER; note = 2'-O-methyl modified nucleotide
  modified_base 16: mod_base = OTHER; note = 2'-O-methyl modified nucleotide
  modified_base 17: mod_base = OTHER; note = 2'-O-methyl modified nucleotide
  modified_base 18: mod_base = OTHER; note = 2'-O-methyl modified nucleotide
  modified_base 19: mod_base = OTHER; note = 2'-O-methyl modified nucleotide
  modified_base 20: mod_base = OTHER; note = 2'-O-methyl modified nucleotide
  modified_base 21: mod_base = OTHER; note = 2'-O-methyl modified nucleotide
cctggttctcattccttgcaa

SEQ ID NO: 178 - RNA, 21 nt, synthetic construct
  source 1..21: mol_type = other RNA
  modified_base 1: mod_base = OTHER; note = 2'-O-methyl modified nucleotide with phosphorothioate linkage
  modified_base 2: mod_base = OTHER; note = 2'-O-methyl modified nucleotide with phosphorothioate linkage
  modified_base 3: mod_base = OTHER; note = 2'-O-methyl modified nucleotide
  modified_base 4: mod_base = OTHER; note = 2'-O-methyl modified nucleotide
  modified_base 5: mod_base = OTHER; note = 2'-O-methyl modified nucleotide
  modified_base 6: mod_base = OTHER; note = 2'-O-methyl modified nucleotide
  modified_base 7: mod_base = OTHER; note = 2'-fluoro modified nucleotide
  modified_base 8: mod_base = OTHER; note = 2'-O-methyl modified nucleotide
  modified_base 9: mod_base = OTHER; note = 2'-fluoro modified nucleotide
  modified_base 10: mod_base = OTHER; note = 2'-fluoro modified nucleotide
  modified_base 11: mod_base = OTHER; note = 2'-fluoro modified nucleotide
  modified_base 12: mod_base = OTHER; note = 2'-O-methyl modified nucleotide
  modified_base 13: mod_base = OTHER; note = 2'-O-methyl modified nucleotide
  modified_base 14: mod_base = OTHER; note = 2'-O-methyl modified nucleotide
  modified_base 15: mod_base = OTHER; note = 2'-O-methyl modified nucleotide
  modified_base 16: mod_base = OTHER; note = 2'-O-methyl modified nucleotide
  modified_base 17: mod_base = OTHER; note = 2'-O-methyl modified nucleotide
  modified_base 18: mod_base = OTHER; note = 2'-O-methyl modified nucleotide
  modified_base 19: mod_base = OTHER; note = 2'-O-methyl modified nucleotide
  modified_base 20: mod_base = OTHER; note = 2'-O-methyl modified nucleotide
  modified_base 21: mod_base = OTHER; note = 2'-O-methyl modified nucleotide
ttctcattccttgcaccataa

SEQ ID NO: 179 - RNA, 21 nt, synthetic construct
  source 1..21: mol_type = other RNA
  modified_base 1: mod_base = OTHER; note = 2'-O-methyl modified nucleotide with phosphorothioate linkage
  modified_base 2: mod_base = OTHER; note = 2'-O-methyl modified nucleotide with phosphorothioate linkage
  modified_base 3: mod_base = OTHER; note = 2'-O-methyl modified nucleotide
  modified_base 4: mod_base = OTHER; note = 2'-O-methyl modified nucleotide
  modified_base 5: mod_base = OTHER; note = 2'-O-methyl modified nucleotide
  modified_base 6: mod_base = OTHER; note = 2'-O-methyl modified nucleotide
  modified_base 7: mod_base = OTHER; note = 2'-fluoro modified nucleotide
  modified_base 8: mod_base = OTHER; note = 2'-O-methyl modified nucleotide
  modified_base 9: mod_base = OTHER; note = 2'-fluoro modified nucleotide
  modified_base 10: mod_base = OTHER; note = 2'-fluoro modified nucleotide
  modified_base 11: mod_base = OTHER; note = 2'-fluoro modified nucleotide
  modified_base 12: mod_base = OTHER; note = 2'-O-methyl modified nucleotide
  modified_base 13: mod_base = OTHER; note = 2'-O-methyl modified nucleotide
  modified_base 14: mod_base = OTHER; note = 2'-O-methyl modified nucleotide
  modified_base 15: mod_base = OTHER; note = 2'-O-methyl modified nucleotide
  modified_base 16: mod_base = OTHER; note = 2'-O-methyl modified nucleotide
  modified_base 17: mod_base = OTHER; note = 2'-O-methyl modified nucleotide
  modified_base 18: mod_base = OTHER; note = 2'-O-methyl modified nucleotide
  modified_base 19: mod_base = OTHER; note = 2'-O-methyl modified nucleotide
  modified_base 20: mod_base = OTHER; note = 2'-O-methyl modified nucleotide
  modified_base 21: mod_base = OTHER; note = 2'-O-methyl modified nucleotide
tattggctttctgctgggtta

SEQ ID NO: 180 - RNA, 21 nt, synthetic construct
  source 1..21: mol_type = other RNA
  modified_base 1: mod_base = OTHER; note = 2'-O-methyl modified nucleotide with phosphorothioate linkage
  modified_base 2: mod_base = OTHER; note = 2'-O-methyl modified nucleotide with phosphorothioate linkage
  modified_base 3: mod_base = OTHER; note = 2'-O-methyl modified nucleotide
  modified_base 4: mod_base = OTHER; note = 2'-O-methyl modified nucleotide
  modified_base 5: mod_base = OTHER; note = 2'-O-methyl modified nucleotide
  modified_base 6: mod_base = OTHER; note = 2'-O-methyl modified nucleotide
  modified_base 7: mod_base = OTHER; note = 2'-fluoro modified nucleotide
  modified_base 8: mod_base = OTHER; note = 2'-O-methyl modified nucleotide
  modified_base 9: mod_base = OTHER; note = 2'-fluoro modified nucleotide
  modified_base 10: mod_base = OTHER; note = 2'-fluoro modified nucleotide
  modified_base 11: mod_base = OTHER; note = 2'-fluoro modified nucleotide
  modified_base 12: mod_base = OTHER; note = 2'-O-methyl modified nucleotide
  modified_base 13: mod_base = OTHER; note = 2'-O-methyl modified nucleotide
  modified_base 14: mod_base = OTHER; note = 2'-O-methyl modified nucleotide
  modified_base 15: mod_base = OTHER; note = 2'-O-methyl modified nucleotide
  modified_base 16: mod_base = OTHER; note = 2'-O-methyl modified nucleotide
  modified_base 17: mod_base = OTHER; note = 2'-O-methyl modified nucleotide
  modified_base 18: mod_base = OTHER; note = 2'-O-methyl modified nucleotide
  modified_base 19: mod_base = OTHER; note = 2'-O-methyl modified nucleotide
  modified_base 20: mod_base = OTHER; note = 2'-O-methyl modified nucleotide
  modified_base 21: mod_base = OTHER; note = 2'-O-methyl modified nucleotide
cctcctctacatgattttcca

SEQ ID NO: 181 - RNA, 19 nt, synthetic construct
  source 1..19: mol_type = other RNA
  modified_base 1: mod_base = OTHER; note = 2'-O-methyl modified nucleotide with phosphorothioate linkage
  modified_base 2: mod_base = OTHER; note = 2'-O-methyl modified nucleotide with phosphorothioate linkage
  modified_base 3: mod_base = OTHER; note = 2'-fluoro modified nucleotide
  modified_base 4: mod_base = OTHER; note = 2'-O-methyl modified nucleotide
  modified_base 5: mod_base = OTHER; note = 2'-fluoro modified nucleotide
  modified_base 6: mod_base = OTHER; note = 2'-O-methyl modified nucleotide
  modified_base 7: mod_base = OTHER; note = 2'-fluoro modified nucleotide
  modified_base 8: mod_base = OTHER; note = 2'-fluoro modified nucleotide
  modified_base 9: mod_base = OTHER; note = 2'-fluoro modified nucleotide
  modified_base 10: mod_base = OTHER; note = 2'-O-methyl modified nucleotide
  modified_base 11: mod_base = OTHER; note = 2'-O-methyl modified nucleotide
  modified_base 12: mod_base = OTHER; note = 2'-O-methyl modified nucleotide
  modified_base 13: mod_base = OTHER; note = 2'-O-methyl modified nucleotide
  modified_base 14: mod_base = OTHER; note = 2'-fluoro modified nucleotide
  modified_base 15: mod_base = OTHER; note = 2'-O-methyl modified nucleotide
  modified_base 16: mod_base = OTHER; note = 2'-O-methyl modified nucleotide
  modified_base 17: mod_base = OTHER; note = 2'-O-methyl modified nucleotide
  modified_base 18: mod_base = OTHER; note = 2'-O-methyl modified nucleotide
  modified_base 19: mod_base = OTHER; note = 2'-O-methyl modified nucleotide
agatcaaggctcacttata

SEQ ID NO: 182 - RNA, 19 nt, synthetic construct
  source 1..19: mol_type = other RNA
  modified_base 1: mod_base = OTHER; note = 2'-O-methyl modified nucleotide with phosphorothioate linkage
  modified_base 2: mod_base = OTHER; note = 2'-O-methyl modified nucleotide with phosphorothioate linkage
  modified_base 3: mod_base = OTHER; note = 2'-fluoro modified nucleotide
  modified_base 4: mod_base = OTHER; note = 2'-O-methyl modified nucleotide
  modified_base 5: mod_base = OTHER; note = 2'-fluoro modified nucleotide
  modified_base 6: mod_base = OTHER; note = 2'-O-methyl modified nucleotide
  modified_base 7: mod_base = OTHER; note = 2'-fluoro modified nucleotide
  modified_base 8: mod_base = OTHER; note = 2'-fluoro modified nucleotide
  modified_base 9: mod_base = OTHER; note = 2'-fluoro modified nucleotide
  modified_base 10: mod_base = OTHER; note = 2'-O-methyl modified nucleotide
  modified_base 11: mod_base = OTHER; note = 2'-O-methyl modified nucleotide
  modified_base 12: mod_base = OTHER; note = 2'-O-methyl modified nucleotide
  modified_base 13: mod_base = OTHER; note = 2'-O-methyl modified nucleotide
  modified_base 14: mod_base = OTHER; note = 2'-fluoro modified nucleotide
  modified_base 15: mod_base = OTHER; note = 2'-O-methyl modified nucleotide
  modified_base 16: mod_base = OTHER; note = 2'-O-methyl modified nucleotide
  modified_base 17: mod_base = OTHER; note = 2'-O-methyl modified nucleotide
  modified_base 18: mod_base = OTHER; note = 2'-O-methyl modified nucleotide
  modified_base 19: mod_base = OTHER; note = 2'-O-methyl modified nucleotide
tcagcattgtgatgaccaa

SEQ ID NO: 183 - RNA, 19 nt, synthetic construct
  source 1..19: mol_type = other RNA
  modified_base 1: mod_base = OTHER; note = 2'-O-methyl modified nucleotide with phosphorothioate linkage
  modified_base 2: mod_base = OTHER; note = 2'-O-methyl modified nucleotide with phosphorothioate linkage
  modified_base 3: mod_base = OTHER; note = 2'-fluoro modified nucleotide
  modified_base 4: mod_base = OTHER; note = 2'-O-methyl modified nucleotide
  modified_base 5: mod_base = OTHER; note = 2'-fluoro modified nucleotide
  modified_base 6: mod_base = OTHER; note = 2'-O-methyl modified nucleotide
  modified_base 7: mod_base = OTHER; note = 2'-fluoro modified nucleotide
  modified_base 8: mod_base = OTHER; note = 2'-fluoro modified nucleotide
  modified_base 9: mod_base = OTHER; note = 2'-fluoro modified nucleotide
  modified_base 10: mod_base = OTHER; note = 2'-O-methyl modified nucleotide
  modified_base 11: mod_base = OTHER; note = 2'-O-methyl modified nucleotide
  modified_base 12: mod_base = OTHER; note = 2'-O-methyl modified nucleotide
  modified_base 13: mod_base = OTHER; note = 2'-O-methyl modified nucleotide
  modified_base 14: mod_base = OTHER; note = 2'-fluoro modified nucleotide
  modified_base 15: mod_base = OTHER; note = 2'-O-methyl modified nucleotide
  modified_base 16: mod_base = OTHER; note = 2'-O-methyl modified nucleotide
  modified_base 17: mod_base = OTHER; note = 2'-O-methyl modified nucleotide
  modified_base 18: mod_base = OTHER; note = 2'-O-methyl modified nucleotide
  modified_base 19: mod_base = OTHER; note = 2'-O-methyl modified nucleotide
tcatcattctcttgtgcaa

SEQ ID NO: 184 - RNA, 19 nt, synthetic construct
  source 1..19: mol_type = other RNA
  modified_base 1: mod_base = OTHER; note = 2'-O-methyl modified nucleotide with phosphorothioate linkage
  modified_base 2: mod_base = OTHER; note = 2'-O-methyl modified nucleotide with phosphorothioate linkage
  modified_base 3: mod_base = OTHER; note = 2'-fluoro modified nucleotide
  modified_base 4: mod_base = OTHER; note = 2'-O-methyl modified nucleotide
  modified_base 5: mod_base = OTHER; note = 2'-fluoro modified nucleotide
  modified_base 6: mod_base = OTHER; note = 2'-O-methyl modified nucleotide
  modified_base 7: mod_base = OTHER; note = 2'-fluoro modified nucleotide
  modified_base 8: mod_base = OTHER; note = 2'-fluoro modified nucleotide
  modified_base 9: mod_base = OTHER; note = 2'-fluoro modified nucleotide
  modified_base 10: mod_base = OTHER; note = 2'-O-methyl modified nucleotide
  modified_base 11: mod_base = OTHER; note = 2'-O-methyl modified nucleotide
  modified_base 12: mod_base = OTHER; note = 2'-O-methyl modified nucleotide
  modified_base 13: mod_base = OTHER; note = 2'-O-methyl modified nucleotide
  modified_base 14: mod_base = OTHER; note = 2'-fluoro modified nucleotide
  modified_base 15: mod_base = OTHER; note = 2'-O-methyl modified nucleotide
  modified_base 16: mod_base = OTHER; note = 2'-O-methyl modified nucleotide
  modified_base 17: mod_base = OTHER; note = 2'-O-methyl modified nucleotide
  modified_base 18: mod_base = OTHER; note = 2'-O-methyl modified nucleotide
  modified_base 19: mod_base = OTHER; note = 2'-O-methyl modified nucleotide
tggccgtcacagttctcta

SEQ ID NO: 185 - RNA, 19 nt, synthetic construct
  source 1..19: mol_type = other RNA
  modified_base 1: mod_base = OTHER; note = 2'-O-methyl modified nucleotide with phosphorothioate linkage
  modified_base 2: mod_base = OTHER; note = 2'-O-methyl modified nucleotide with phosphorothioate linkage
  modified_base 3: mod_base = OTHER; note = 2'-fluoro modified nucleotide
  modified_base 4: mod_base = OTHER; note = 2'-O-methyl modified nucleotide
  modified_base 5: mod_base = OTHER; note = 2'-fluoro modified nucleotide
  modified_base 6: mod_base = OTHER; note = 2'-O-methyl modified nucleotide
  modified_base 7: mod_base = OTHER; note = 2'-fluoro modified nucleotide
  modified_base 8: mod_base = OTHER; note = 2'-fluoro modified nucleotide
  modified_base 9: mod_base = OTHER; note = 2'-fluoro modified nucleotide
  modified_base 10: mod_base = OTHER; note = 2'-O-methyl modified nucleotide
  modified_base 11: mod_base = OTHER; note = 2'-O-methyl modified nucleotide
  modified_base 12: mod_base = OTHER; note = 2'-O-methyl modified nucleotide
  modified_base 13: mod_base = OTHER; note = 2'-O-methyl modified nucleotide
  modified_base 14: mod_base = OTHER; note = 2'-fluoro modified nucleotide
  modified_base 15: mod_base = OTHER; note = 2'-O-methyl modified nucleotide
  modified_base 16: mod_base = OTHER; note = 2'-O-methyl modified nucleotide
  modified_base 17: mod_base = OTHER; note = 2'-O-methyl modified nucleotide
  modified_base 18: mod_base = OTHER; note = 2'-O-methyl modified nucleotide
  modified_base 19: mod_base = OTHER; note = 2'-O-methyl modified nucleotide
tggtcccaaagcaattcta

SEQ ID NO: 186 - RNA, 19 nt, synthetic construct
  source 1..19: mol_type = other RNA
  modified_base 1: mod_base = OTHER; note = 2'-O-methyl modified nucleotide with phosphorothioate linkage
  modified_base 2: mod_base = OTHER; note = 2'-O-methyl modified nucleotide with phosphorothioate linkage
  modified_base 3: mod_base = OTHER; note = 2'-fluoro modified nucleotide
  modified_base 4: mod_base = OTHER; note = 2'-O-methyl modified nucleotide
  modified_base 5: mod_base = OTHER; note = 2'-fluoro modified nucleotide
  modified_base 6: mod_base = OTHER; note = 2'-O-methyl modified nucleotide
  modified_base 7: mod_base = OTHER; note = 2'-fluoro modified nucleotide
  modified_base 8: mod_base = OTHER; note = 2'-fluoro modified nucleotide
  modified_base 9: mod_base = OTHER; note = 2'-fluoro modified nucleotide
  modified_base 10: mod_base = OTHER; note = 2'-O-methyl modified nucleotide
  modified_base 11: mod_base = OTHER; note = 2'-O-methyl modified nucleotide
  modified_base 12: mod_base = OTHER; note = 2'-O-methyl modified nucleotide
  modified_base 13: mod_base = OTHER; note = 2'-O-methyl modified nucleotide
  modified_base 14: mod_base = OTHER; note = 2'-fluoro modified nucleotide
  modified_base 15: mod_base = OTHER; note = 2'-O-methyl modified nucleotide
  modified_base 16: mod_base = OTHER; note = 2'-O-methyl modified nucleotide
  modified_base 17: mod_base = OTHER; note = 2'-O-methyl modified nucleotide
  modified_base 18: mod_base = OTHER; note = 2'-O-methyl modified nucleotide
  modified_base 19: mod_base = OTHER; note = 2'-O-methyl modified nucleotide
tccagtacatctatcagaa

SEQ ID NO: 187 - RNA, 19 nt, synthetic construct
  source 1..19: mol_type = other RNA
  modified_base 1: mod_base = OTHER; note = 2'-O-methyl modified nucleotide with phosphorothioate linkage
  modified_base 2: mod_base = OTHER; note = 2'-O-methyl modified nucleotide with phosphorothioate linkage
  modified_base 3: mod_base = OTHER; note = 2'-fluoro modified nucleotide
  modified_base 4: mod_base = OTHER; note = 2'-O-methyl modified nucleotide
  modified_base 5: mod_base = OTHER; note = 2'-fluoro modified nucleotide
  modified_base 6: mod_base = OTHER; note = 2'-O-methyl modified nucleotide
  modified_base 7: mod_base = OTHER; note = 2'-fluoro modified nucleotide
  modified_base 8: mod_base = OTHER; note = 2'-fluoro modified nucleotide
  modified_base 9: mod_base = OTHER; note = 2'-fluoro modified nucleotide
  modified_base 10: mod_base = OTHER; note = 2'-O-methyl modified nucleotide
  modified_base 11: mod_base = OTHER; note = 2'-O-methyl modified nucleotide
  modified_base 12: mod_base = OTHER; note = 2'-O-methyl modified nucleotide
  modified_base 13: mod_base = OTHER; note = 2'-O-methyl modified nucleotide
  modified_base 14: mod_base = OTHER; note = 2'-fluoro modified nucleotide
  modified_base 15: mod_base = OTHER; note = 2'-O-methyl modified nucleotide
  modified_base 16: mod_base = OTHER; note = 2'-O-methyl modified nucleotide
  modified_base 17: mod_base = OTHER; note = 2'-O-methyl modified nucleotide
  modified_base 18: mod_base = OTHER; note = 2'-O-methyl modified nucleotide
  modified_base 19: mod_base = OTHER; note = 2'-O-methyl modified nucleotide
ccagtacatctatcagaaa

SEQ ID NO: 188 - RNA, 19 nt, synthetic construct
  source 1..19: mol_type = other RNA
  modified_base 1: mod_base = OTHER; note = 2'-O-methyl modified nucleotide with phosphorothioate linkage
  modified_base 2: mod_base = OTHER; note = 2'-O-methyl modified nucleotide with phosphorothioate linkage
  modified_base 3: mod_base = OTHER; note = 2'-fluoro modified nucleotide
  modified_base 4: mod_base = OTHER; note = 2'-O-methyl modified nucleotide
  modified_base 5: mod_base = OTHER; note = 2'-fluoro modified nucleotide
  modified_base 6: mod_base = OTHER; note = 2'-O-methyl modified nucleotide
  modified_base 7: mod_base = OTHER; note = 2'-fluoro modified nucleotide
  modified_base 8: mod_base = OTHER; note = 2'-fluoro modified nucleotide
  modified_base 9: mod_base = OTHER; note = 2'-fluoro modified nucleotide
  modified_base 10: mod_base = OTHER; note = 2'-O-methyl modified nucleotide
  modified_base 11: mod_base = OTHER; note = 2'-O-methyl modified nucleotide
  modified_base 12: mod_base = OTHER; note = 2'-O-methyl modified nucleotide
  modified_base 13: mod_base = OTHER; note = 2'-O-methyl modified nucleotide
  modified_base 14: mod_base = OTHER; note = 2'-fluoro modified nucleotide
  modified_base 15: mod_base = OTHER; note = 2'-O-methyl modified nucleotide
  modified_base 16: mod_base = OTHER; note = 2'-O-methyl modified nucleotide
  modified_base 17: mod_base = OTHER; note = 2'-O-methyl modified nucleotide
  modified_base 18: mod_base = OTHER; note = 2'-O-methyl modified nucleotide
  modified_base 19: mod_base = OTHER; note = 2'-O-methyl modified nucleotide
atctatcagaatcatcaaa

SEQ ID NO: 189 - RNA, 19 nt, synthetic construct
  source 1..19: mol_type = other RNA
  modified_base 1: mod_base = OTHER; note = 2'-O-methyl modified nucleotide with phosphorothioate linkage
  modified_base 2: mod_base = OTHER; note = 2'-O-methyl modified nucleotide with phosphorothioate linkage
  modified_base 3: mod_base = OTHER; note = 2'-fluoro modified nucleotide
  modified_base 4: mod_base = OTHER; note = 2'-O-methyl modified nucleotide
  modified_base 5: mod_base = OTHER; note = 2'-fluoro modified nucleotide
  modified_base 6: mod_base = OTHER; note = 2'-O-methyl modified nucleotide
  modified_base 7: mod_base = OTHER; note = 2'-fluoro modified nucleotide
  modified_base 8: mod_base = OTHER; note = 2'-fluoro modified nucleotide
  modified_base 9: mod_base = OTHER; note = 2'-fluoro modified nucleotide
  modified_base 10: mod_base = OTHER; note = 2'-O-methyl modified nucleotide
  modified_base 11: mod_base = OTHER; note = 2'-O-methyl modified nucleotide
  modified_base 12: mod_base = OTHER; note = 2'-O-methyl modified nucleotide
  modified_base 13: mod_base = OTHER; note = 2'-O-methyl modified nucleotide
  modified_base 14: mod_base = OTHER; note = 2'-fluoro modified nucleotide
  modified_base 15: mod_base = OTHER; note = 2'-O-methyl modified nucleotide
  modified_base 16: mod_base = OTHER; note = 2'-O-methyl modified nucleotide
  modified_base 17: mod_base = OTHER; note = 2'-O-methyl modified nucleotide
  modified_base 18: mod_base = OTHER; note = 2'-O-methyl modified nucleotide
  modified_base 19: mod_base = OTHER; note = 2'-O-methyl modified nucleotide
aagtcactcaattcctgaa

SEQ ID NO: 190 - RNA, 19 nt, synthetic construct
  source 1..19: mol_type = other RNA
  modified_base 1: mod_base = OTHER; note = 2'-O-methyl modified nucleotide with phosphorothioate linkage
  modified_base 2: mod_base = OTHER; note = 2'-O-methyl modified nucleotide with phosphorothioate linkage
  modified_base 3: mod_base = OTHER; note = 2'-fluoro modified nucleotide
  modified_base 4: mod_base = OTHER; note = 2'-O-methyl modified nucleotide
  modified_base 5: mod_base = OTHER; note = 2'-fluoro modified nucleotide
  modified_base 6: mod_base = OTHER; note = 2'-O-methyl modified nucleotide
  modified_base 7: mod_base = OTHER; note = 2'-fluoro modified nucleotide
  modified_base 8: mod_base = OTHER; note = 2'-fluoro modified nucleotide
  modified_base 9: mod_base = OTHER; note = 2'-fluoro modified nucleotide
  modified_base 10: mod_base = OTHER; note = 2'-O-methyl modified nucleotide
  modified_base 11: mod_base = OTHER; note = 2'-O-methyl modified nucleotide
  modified_base 12: mod_base = OTHER; note = 2'-O-methyl modified nucleotide
  modified_base 13: mod_base = OTHER; note = 2'-O-methyl modified nucleotide
  modified_base 14: mod_base = OTHER; note = 2'-fluoro modified nucleotide
  modified_base 15: mod_base = OTHER; note = 2'-O-methyl modified nucleotide
  modified_base 16: mod_base = OTHER; note = 2'-O-methyl modified nucleotide
  modified_base 17: mod_base = OTHER; note = 2'-O-methyl modified nucleotide
  modified_base 18: mod_base = OTHER; note = 2'-O-methyl modified nucleotide
  modified_base 19: mod_base = OTHER; note = 2'-O-methyl modified nucleotide
cctgaactaatcaatataa

SEQ ID NO: 191 - RNA, 19 nt, synthetic construct
  source 1..19: mol_type = other RNA
  modified_base 1: mod_base = OTHER; note = 2'-O-methyl modified nucleotide with phosphorothioate linkage
  modified_base 2: mod_base = OTHER; note = 2'-O-methyl modified nucleotide with phosphorothioate linkage
  modified_base 3: mod_base = OTHER; note = 2'-fluoro modified nucleotide
  modified_base 4: mod_base = OTHER; note = 2'-O-methyl modified nucleotide
  modified_base 5: mod_base = OTHER; note = 2'-fluoro modified nucleotide
  modified_base 6: mod_base = OTHER; note = 2'-O-methyl modified nucleotide
  modified_base 7: mod_base = OTHER; note = 2'-fluoro modified nucleotide
  modified_base 8: mod_base = OTHER; note = 2'-fluoro modified nucleotide
  modified_base 9: mod_base = OTHER; note = 2'-fluoro modified nucleotide
  modified_base 10: mod_base = OTHER; note = 2'-O-methyl modified nucleotide
  modified_base 11: mod_base = OTHER; note = 2'-O-methyl modified nucleotide
  modified_base 12: mod_base = OTHER; note = 2'-O-methyl modified nucleotide
  modified_base 13: mod_base = OTHER; note = 2'-O-methyl modified nucleotide
  modified_base 14: mod_base = OTHER; note = 2'-fluoro modified nucleotide
  modified_base 15: mod_base = OTHER; note = 2'-O-methyl modified nucleotide
  modified_base 16: mod_base = OTHER; note = 2'-O-methyl modified nucleotide
  modified_base 17: mod_base = OTHER; note = 2'-O-methyl modified nucleotide
  modified_base 18: mod_base = OTHER; note = 2'-O-methyl modified nucleotide
  modified_base 19: mod_base = OTHER; note = 2'-O-methyl modified nucleotide
tgaactaatcaatatataa

SEQ ID NO: 192 - RNA, 19 nt, synthetic construct
  source 1..19: mol_type = other RNA
  modified_base 1: mod_base = OTHER; note = 2'-O-methyl modified nucleotide with phosphorothioate linkage
  modified_base 2: mod_base = OTHER; note = 2'-O-methyl modified nucleotide with phosphorothioate linkage
  modified_base 3: mod_base = OTHER; note = 2'-fluoro modified nucleotide
  modified_base 4: mod_base = OTHER; note = 2'-O-methyl modified nucleotide
  modified_base 5: mod_base = OTHER; note = 2'-fluoro modified nucleotide
  modified_base 6: mod_base = OTHER; note = 2'-O-methyl modified nucleotide
  modified_base 7: mod_base = OTHER; note = 2'-fluoro modified nucleotide
  modified_base 8: mod_base = OTHER; note = 2'-fluoro modified nucleotide
  modified_base 9: mod_base = OTHER; note = 2'-fluoro modified nucleotide
  modified_base 10: mod_base = OTHER; note = 2'-O-methyl modified nucleotide
  modified_base 11: mod_base = OTHER; note = 2'-O-methyl modified nucleotide
  modified_base 12: mod_base = OTHER; note = 2'-O-methyl modified nucleotide
  modified_base 13: mod_base = OTHER; note = 2'-O-methyl modified nucleotide
  modified_base 14: mod_base = OTHER; note = 2'-fluoro modified nucleotide
  modified_base 15: mod_base = OTHER; note = 2'-O-methyl modified nucleotide
  modified_base 16: mod_base = OTHER; note = 2'-O-methyl modified nucleotide
  modified_base 17: mod_base = OTHER; note = 2'-O-methyl modified nucleotide
  modified_base 18: mod_base = OTHER; note = 2'-O-methyl modified nucleotide
  modified_base 19: mod_base = OTHER; note = 2'-O-methyl modified nucleotide
tggttctcattccttgcaa

SEQ ID NO: 193 - RNA, 19 nt, synthetic construct
  source 1..19: mol_type = other RNA
  modified_base 1: mod_base = OTHER; note = 2'-O-methyl modified nucleotide with phosphorothioate linkage
  modified_base 2: mod_base = OTHER; note = 2'-O-methyl modified nucleotide with phosphorothioate linkage
  modified_base 3: mod_base = OTHER; note = 2'-fluoro modified nucleotide
  modified_base 4: mod_base = OTHER; note = 2'-O-methyl modified nucleotide
  modified_base 5: mod_base = OTHER; note = 2'-fluoro modified nucleotide
  modified_base 6: mod_base = OTHER; note = 2'-O-methyl modified nucleotide
  modified_base 7: mod_base = OTHER; note = 2'-fluoro modified nucleotide
  modified_base 8: mod_base = OTHER; note = 2'-fluoro modified nucleotide
  modified_base 9: mod_base = OTHER; note = 2'-fluoro modified nucleotide
  modified_base 10: mod_base = OTHER; note = 2'-O-methyl modified nucleotide
  modified_base 11: mod_base = OTHER; note = 2'-O-methyl modified nucleotide
  modified_base 12: mod_base = OTHER; note = 2'-O-methyl modified nucleotide
  modified_base 13: mod_base = OTHER; note = 2'-O-methyl modified nucleotide
  modified_base 14: mod_base = OTHER; note = 2'-fluoro modified nucleotide
  modified_base 15: mod_base = OTHER; note = 2'-O-methyl modified nucleotide
  modified_base 16: mod_base = OTHER; note = 2'-O-methyl modified nucleotide
  modified_base 17: mod_base = OTHER; note = 2'-O-methyl modified nucleotide
  modified_base 18: mod_base = OTHER; note = 2'-O-methyl modified nucleotide
  modified_base 19: mod_base = OTHER; note = 2'-O-methyl modified nucleotide
ctcattccttgcaccataa

SEQ ID NO: 194 - RNA, 19 nt, synthetic construct
  source 1..19: mol_type = other RNA
  modified_base 1: mod_base = OTHER; note = 2'-O-methyl modified nucleotide with phosphorothioate linkage
  modified_base 2: mod_base = OTHER; note = 2'-O-methyl modified nucleotide with phosphorothioate linkage
  modified_base 3: mod_base = OTHER; note = 2'-fluoro modified nucleotide
  modified_base 4: mod_base = OTHER; note = 2'-O-methyl modified nucleotide
  modified_base 5: mod_base = OTHER; note = 2'-fluoro modified nucleotide
  modified_base 6: mod_base = OTHER; note = 2'-O-methyl modified nucleotide
  modified_base 7: mod_base = OTHER; note = 2'-fluoro modified nucleotide
  modified_base 8: mod_base = OTHER; note = 2'-fluoro modified nucleotide
  modified_base 9: mod_base = OTHER; note = 2'-fluoro modified nucleotide
  modified_base 10: mod_base = OTHER; note = 2'-O-methyl modified nucleotide
  modified_base 11: mod_base = OTHER; note = 2'-O-methyl modified nucleotide
  modified_base 12: mod_base = OTHER; note = 2'-O-methyl modified nucleotide
  modified_base 13: mod_base = OTHER; note = 2'-O-methyl modified nucleotide
  modified_base 14: mod_base = OTHER; note = 2'-fluoro modified nucleotide
  modified_base 15: mod_base = OTHER; note = 2'-O-methyl modified nucleotide
  modified_base 16: mod_base = OTHER; note = 2'-O-methyl modified nucleotide
  modified_base 17: mod_base = OTHER; note = 2'-O-methyl modified nucleotide
  modified_base 18: mod_base = OTHER; note = 2'-O-methyl modified nucleotide
  modified_base 19: mod_base = OTHER; note = 2'-O-methyl modified nucleotide
ttggctttctgctgggtta

SEQ ID NO: 195 - RNA, 19 nt, synthetic construct
  source 1..19: mol_type = other RNA
  modified_base 1: mod_base = OTHER; note = 2'-O-methyl modified nucleotide with phosphorothioate linkage
  modified_base 2: mod_base = OTHER; note = 2'-O-methyl modified nucleotide with phosphorothioate linkage
  modified_base 3: mod_base = OTHER; note = 2'-fluoro modified nucleotide
  modified_base 4: mod_base = OTHER; note = 2'-O-methyl modified nucleotide
  modified_base 5: mod_base = OTHER; note = 2'-fluoro modified nucleotide
  modified_base 6: mod_base = OTHER; note = 2'-O-methyl modified nucleotide
  modified_base 7: mod_base = OTHER; note = 2'-fluoro modified nucleotide
  modified_base 8: mod_base = OTHER; note = 2'-fluoro modified nucleotide
  modified_base 9: mod_base = OTHER; note = 2'-fluoro modified nucleotide
  modified_base 10: mod_base = OTHER; note = 2'-O-methyl modified nucleotide
  modified_base 11: mod_base = OTHER; note = 2'-O-methyl modified nucleotide
  modified_base 12: mod_base = OTHER; note = 2'-O-methyl modified nucleotide
  modified_base 13: mod_base = OTHER; note = 2'-O-methyl modified nucleotide
  modified_base 14: mod_base = OTHER; note = 2'-fluoro modified nucleotide
  modified_base 15: mod_base = OTHER; note = 2'-O-methyl modified nucleotide
  modified_base 16: mod_base = OTHER; note = 2'-O-methyl modified nucleotide
  modified_base 17: mod_base = OTHER; note = 2'-O-methyl modified nucleotide
  modified_base 18: mod_base = OTHER; note = 2'-O-methyl modified nucleotide
  modified_base 19: mod_base = OTHER; note = 2'-O-methyl modified nucleotide
tcctctacatgattttcca

SEQ ID NO: 196 - RNA, 19 nt, synthetic construct
  source 1..19: mol_type = other RNA
  modified_base 1: mod_base = OTHER; note = 2'-O-methyl modified nucleotide with phosphorothioate linkage
  modified_base 2: mod_base = OTHER; note = 2'-O-methyl modified nucleotide with phosphorothioate linkage
  modified_base 3: mod_base = OTHER; note = 2'-O-methyl modified nucleotide
  modified_base 4: mod_base = OTHER; note = 2'-O-methyl modified nucleotide
  modified_base 5: mod_base = OTHER; note = 2'-fluoro modified nucleotide
  modified_base 6: mod_base = OTHER; note = 2'-O-methyl modified nucleotide
  modified_base 7: mod_base = OTHER; note = 2'-fluoro modified nucleotide
  modified_base 8: mod_base = OTHER; note = 2'-fluoro modified nucleotide
  modified_base 9: mod_base = OTHER; note = 2'-fluoro modified nucleotide
  modified_base 10: mod_base = OTHER; note = 2'-O-methyl modified nucleotide
  modified_base 11: mod_base = OTHER; note = 2'-O-methyl modified nucleotide
  modified_base 12: mod_base = OTHER; note = 2'-O-methyl modified nucleotide
  modified_base 13: mod_base = OTHER; note = 2'-O-methyl modified nucleotide
  modified_base 14: mod_base = OTHER; note = 2'-fluoro modified nucleotide
  modified_base 15: mod_base = OTHER; note = 2'-fluoro modified nucleotide
  modified_base 16: mod_base = OTHER; note = 2'-O-methyl modified nucleotide
  modified_base 17: mod_base = OTHER; note = 2'-O-methyl modified nucleotide
  modified_base 18: mod_base = OTHER; note = 2'-O-methyl modified nucleotide
  modified_base 19: mod_base = OTHER; note = 2'-O-methyl modified nucleotide
agatcaaggctcacttata

SEQ ID NO: 197 - RNA, 19 nt, synthetic construct
  source 1..19: mol_type = other RNA
  modified_base 1: mod_base = OTHER; note = 2'-O-methyl modified nucleotide with phosphorothioate linkage
  modified_base 2: mod_base = OTHER; note = 2'-O-methyl modified nucleotide with phosphorothioate linkage
  modified_base 3: mod_base = OTHER; note = 2'-O-methyl modified nucleotide
  modified_base 4: mod_base = OTHER; note = 2'-O-methyl modified nucleotide
  modified_base 5: mod_base = OTHER; note = 2'-fluoro modified nucleotide
  modified_base 6: mod_base = OTHER; note = 2'-O-methyl modified nucleotide
  modified_base 7: mod_base = OTHER; note = 2'-fluoro modified nucleotide
  modified_base 8: mod_base = OTHER; note = 2'-fluoro modified nucleotide
  modified_base 9: mod_base = OTHER; note = 2'-fluoro modified nucleotide
  modified_base 10: mod_base = OTHER; note = 2'-O-methyl modified nucleotide
  modified_base 11: mod_base = OTHER; note = 2'-O-methyl modified nucleotide
  modified_base 12: mod_base = OTHER; note = 2'-O-methyl modified nucleotide
  modified_base 13: mod_base = OTHER; note = 2'-O-methyl modified nucleotide
  modified_base 14: mod_base = OTHER; note = 2'-fluoro modified nucleotide
  modified_base 15: mod_base = OTHER; note = 2'-fluoro modified nucleotide
  modified_base 16: mod_base = OTHER; note = 2'-O-methyl modified nucleotide
  modified_base 17: mod_base = OTHER; note = 2'-O-methyl modified nucleotide
  modified_base 18: mod_base = OTHER; note = 2'-O-methyl modified nucleotide
  modified_base 19: mod_base = OTHER; note = 2'-O-methyl modified nucleotide
tcagcattgtgatgaccaa

SEQ ID NO: 198 - RNA, 19 nt, synthetic construct
  source 1..19: mol_type = other RNA
  modified_base 1: mod_base = OTHER; note = 2'-O-methyl modified nucleotide with phosphorothioate linkage
  modified_base 2: mod_base = OTHER; note = 2'-O-methyl modified nucleotide with phosphorothioate linkage
  modified_base 3: mod_base = OTHER; note = 2'-O-methyl modified nucleotide
  modified_base 4: mod_base = OTHER; note = 2'-O-methyl modified nucleotide
  modified_base 5: mod_base = OTHER; note = 2'-fluoro modified nucleotide
  modified_base 6: mod_base = OTHER; note = 2'-O-methyl modified nucleotide
  modified_base 7: mod_base = OTHER; note = 2'-fluoro modified nucleotide
  modified_base 8: mod_base = OTHER; note = 2'-fluoro modified nucleotide
  modified_base 9: mod_base = OTHER; note = 2'-fluoro modified nucleotide
  modified_base 10: mod_base = OTHER; note = 2'-O-methyl modified nucleotide
  modified_base 11: mod_base = OTHER; note = 2'-O-methyl modified nucleotide
  modified_base 12: mod_base = OTHER; note = 2'-O-methyl modified nucleotide
  modified_base 13: mod_base = OTHER; note = 2'-O-methyl modified nucleotide
  modified_base 14: mod_base = OTHER; note = 2'-fluoro modified nucleotide
  modified_base 15: mod_base = OTHER; note = 2'-fluoro modified nucleotide
  modified_base 16: mod_base = OTHER; note = 2'-O-methyl modified nucleotide
  modified_base 17: mod_base = OTHER; note = 2'-O-methyl modified nucleotide
  modified_base 18: mod_base = OTHER; note = 2'-O-methyl modified nucleotide
  modified_base 19: mod_base = OTHER; note = 2'-O-methyl modified nucleotide
tcatcattctcttgtgcaa

SEQ ID NO: 199 - RNA, 19 nt, synthetic construct
  source 1..19: mol_type = other RNA
  modified_base 1: mod_base = OTHER; note = 2'-O-methyl modified nucleotide with phosphorothioate linkage
  modified_base 2: mod_base = OTHER; note = 2'-O-methyl modified nucleotide with phosphorothioate linkage
  modified_base 3: mod_base = OTHER; note = 2'-O-methyl modified nucleotide
  modified_base 4: mod_base = OTHER; note = 2'-O-methyl modified nucleotide
  modified_base 5: mod_base = OTHER; note = 2'-fluoro modified nucleotide
  modified_base 6: mod_base = OTHER; note = 2'-O-methyl modified nucleotide
  modified_base 7: mod_base = OTHER; note = 2'-fluoro modified nucleotide
  modified_base 8: mod_base = OTHER; note = 2'-fluoro modified nucleotide
  modified_base 9: mod_base = OTHER; note = 2'-fluoro modified nucleotide
  modified_base 10: mod_base = OTHER; note = 2'-O-methyl modified nucleotide
  modified_base 11: mod_base = OTHER; note = 2'-O-methyl modified nucleotide
  modified_base 12: mod_base = OTHER; note = 2'-O-methyl modified nucleotide
  modified_base 13: mod_base = OTHER; note = 2'-O-methyl modified nucleotide
  modified_base 14: mod_base = OTHER; note = 2'-fluoro modified nucleotide
  modified_base 15: mod_base = OTHER; note = 2'-fluoro modified nucleotide
  modified_base 16: mod_base = OTHER; note = 2'-O-methyl modified nucleotide
  modified_base 17: mod_base = OTHER; note = 2'-O-methyl modified nucleotide
  modified_base 18: mod_base = OTHER; note = 2'-O-methyl modified nucleotide
  modified_base 19: mod_base = OTHER; note = 2'-O-methyl modified nucleotide
tggccgtcacagttctcta

SEQ ID NO: 200 - RNA, 19 nt, synthetic construct
  source 1..19: mol_type = other RNA
  modified_base 1: mod_base = OTHER; note = 2'-O-methyl modified nucleotide with phosphorothioate linkage
  modified_base 2: mod_base = OTHER; note = 2'-O-methyl modified nucleotide with phosphorothioate linkage
  modified_base 3: mod_base = OTHER; note = 2'-O-methyl modified nucleotide
  modified_base 4: mod_base = OTHER; note = 2'-O-methyl modified nucleotide
  modified_base 5: mod_base = OTHER; note = 2'-fluoro modified nucleotide
  modified_base 6: mod_base = OTHER; note = 2'-O-methyl modified nucleotide
  modified_base 7: mod_base = OTHER; note = 2'-fluoro modified nucleotide
  modified_base 8: mod_base = OTHER; note = 2'-fluoro modified nucleotide
  modified_base 9: mod_base = OTHER; note = 2'-fluoro modified nucleotide
  modified_base 10: mod_base = OTHER; note = 2'-O-methyl modified nucleotide
  modified_base 11: mod_base = OTHER; note = 2'-O-methyl modified nucleotide
  modified_base 12: mod_base = OTHER; note = 2'-O-methyl modified nucleotide
  modified_base 13: mod_base = OTHER; note = 2'-O-methyl modified nucleotide
  modified_base 14: mod_base = OTHER; note = 2'-fluoro modified nucleotide
  modified_base 15: mod_base = OTHER; note = 2'-fluoro modified nucleotide
  modified_base 16: mod_base = OTHER; note = 2'-O-methyl modified nucleotide
  modified_base 17: mod_base = OTHER; note = 2'-O-methyl modified nucleotide
  modified_base 18: mod_base = OTHER; note = 2'-O-methyl modified nucleotide
  modified_base 19: mod_base = OTHER; note = 2'-O-methyl modified nucleotide
tggtcccaaagcaattcta

SEQ ID NO: 201 - RNA, 19 nt, synthetic construct
  source 1..19: mol_type = other RNA
  modified_base 1: mod_base = OTHER; note = 2'-O-methyl modified nucleotide with phosphorothioate linkage
  modified_base 2: mod_base = OTHER; note = 2'-O-methyl modified nucleotide with phosphorothioate linkage
  modified_base 3: mod_base = OTHER; note = 2'-O-methyl modified nucleotide
  modified_base 4: mod_base = OTHER; note = 2'-O-methyl modified nucleotide
  modified_base 5: mod_base = OTHER; note = 2'-fluoro modified nucleotide
  modified_base 6: mod_base = OTHER; note = 2'-O-methyl modified nucleotide
  modified_base 7: mod_base = OTHER; note = 2'-fluoro modified nucleotide
  modified_base 8: mod_base = OTHER; note = 2'-fluoro modified nucleotide
  modified_base 9: mod_base = OTHER; note = 2'-fluoro modified nucleotide
  modified_base 10: mod_base = OTHER; note = 2'-O-methyl modified nucleotide
  modified_base 11: mod_base = OTHER; note = 2'-O-methyl modified nucleotide
  modified_base 12: mod_base = OTHER; note = 2'-O-methyl modified nucleotide
  modified_base 13: mod_base = OTHER; note = 2'-O-methyl modified nucleotide
  modified_base 14: mod_base = OTHER; note = 2'-fluoro modified nucleotide
  modified_base 15: mod_base = OTHER; note = 2'-fluoro modified nucleotide
  modified_base 16: mod_base = OTHER; note = 2'-O-methyl modified nucleotide
  modified_base 17: mod_base = OTHER; note = 2'-O-methyl modified nucleotide
  modified_base 18: mod_base = OTHER; note = 2'-O-methyl modified nucleotide
  modified_base 19: mod_base = OTHER; note = 2'-O-methyl modified nucleotide
tccagtacatctatcagaa

SEQ ID NO: 202 - RNA, 19 nt, synthetic construct
  source 1..19: mol_type = other RNA
  modified_base 1: mod_base = OTHER; note = 2'-O-methyl modified nucleotide with phosphorothioate linkage
  modified_base 2: mod_base = OTHER; note = 2'-O-methyl modified nucleotide with phosphorothioate linkage
  modified_base 3: mod_base = OTHER; note = 2'-O-methyl modified nucleotide
  modified_base 4: mod_base = OTHER; note = 2'-O-methyl modified nucleotide
  modified_base 5: mod_base = OTHER; note = 2'-fluoro modified nucleotide
  modified_base 6: mod_base = OTHER; note = 2'-O-methyl modified nucleotide
  modified_base 7: mod_base = OTHER; note = 2'-fluoro modified nucleotide
  modified_base 8: mod_base = OTHER; note = 2'-fluoro modified nucleotide
  modified_base 9: mod_base = OTHER; note = 2'-fluoro modified nucleotide
  modified_base 10: mod_base = OTHER; note = 2'-O-methyl modified nucleotide
  modified_base 11: mod_base = OTHER; note = 2'-O-methyl modified nucleotide
  modified_base 12: mod_base = OTHER; note = 2'-O-methyl modified nucleotide
  modified_base 13: mod_base = OTHER; note = 2'-O-methyl modified nucleotide
  modified_base 14: mod_base = OTHER; note = 2'-fluoro modified nucleotide
  modified_base 15: mod_base = OTHER; note = 2'-fluoro modified nucleotide
  modified_base 16: mod_base = OTHER; note = 2'-O-methyl modified nucleotide
  modified_base 17: mod_base = OTHER; note = 2'-O-methyl modified nucleotide
  modified_base 18: mod_base = OTHER; note = 2'-O-methyl modified nucleotide
  modified_base 19: mod_base = OTHER; note = 2'-O-methyl modified nucleotide
ccagtacatctatcagaaa

SEQ ID NO: 203 - RNA, 19 nt, synthetic construct
  source 1..19: mol_type = other RNA
  modified_base 1: mod_base = OTHER; note = 2'-O-methyl modified nucleotide with phosphorothioate linkage
  modified_base 2: mod_base = OTHER; note = 2'-O-methyl modified nucleotide with phosphorothioate linkage
  modified_base 3: mod_base = OTHER; note = 2'-O-methyl modified nucleotide
  modified_base 4: mod_base = OTHER; note = 2'-O-methyl modified nucleotide
  modified_base 5: mod_base = OTHER; note = 2'-fluoro modified nucleotide
  modified_base 6: mod_base = OTHER; note = 2'-O-methyl modified nucleotide
  modified_base 7: mod_base = OTHER; note = 2'-fluoro modified nucleotide
  modified_base 8: mod_base = OTHER; note = 2'-fluoro modified nucleotide
  modified_base 9: mod_base = OTHER; note = 2'-fluoro modified nucleotide
  modified_base 10: mod_base = OTHER; note = 2'-O-methyl modified nucleotide
  modified_base 11: mod_base = OTHER; note = 2'-O-methyl modified nucleotide
  modified_base 12: mod_base = OTHER; note = 2'-O-methyl modified nucleotide
  modified_base 13: mod_base = OTHER; note = 2'-O-methyl modified nucleotide
  modified_base 14: mod_base = OTHER; note = 2'-fluoro modified nucleotide
  modified_base 15: mod_base = OTHER; note = 2'-fluoro modified nucleotide
  modified_base 16: mod_base = OTHER; note = 2'-O-methyl modified nucleotide
  modified_base 17: mod_base = OTHER; note = 2'-O-methyl modified nucleotide
  modified_base 18: mod_base = OTHER; note = 2'-O-methyl modified nucleotide
  modified_base 19: mod_base = OTHER; note = 2'-O-methyl modified nucleotide
atctatcagaatcatcaaa

SEQ ID NO: 204 - RNA, 19 nt, synthetic construct
  source 1..19: mol_type = other RNA
  modified_base 1: mod_base = OTHER; note = 2'-O-methyl modified nucleotide with phosphorothioate linkage
  modified_base 2: mod_base = OTHER; note = 2'-O-methyl modified nucleotide with phosphorothioate linkage
  modified_base 3: mod_base = OTHER; note = 2'-O-methyl modified nucleotide
  modified_base 4: mod_base = OTHER; note = 2'-O-methyl modified nucleotide
  modified_base 5: mod_base = OTHER; note = 2'-fluoro modified nucleotide
  modified_base 6: mod_base = OTHER; note = 2'-O-methyl modified nucleotide
  modified_base 7: mod_base = OTHER; note = 2'-fluoro modified nucleotide
  modified_base 8: mod_base = OTHER; note = 2'-fluoro modified nucleotide
  modified_base 9: mod_base = OTHER; note = 2'-fluoro modified nucleotide
  modified_base 10: mod_base = OTHER; note = 2'-O-methyl modified nucleotide
  modified_base 11: mod_base = OTHER; note = 2'-O-methyl modified nucleotide
  modified_base 12: mod_base = OTHER; note = 2'-O-methyl modified nucleotide
  modified_base 13: mod_base = OTHER; note = 2'-O-methyl modified nucleotide
  modified_base 14: mod_base = OTHER; note = 2'-fluoro modified nucleotide
  modified_base 15: mod_base = OTHER; note = 2'-fluoro modified nucleotide
  modified_base 16: mod_base = OTHER; note = 2'-O-methyl modified nucleotide
  modified_base 17: mod_base = OTHER; note = 2'-O-methyl modified nucleotide
  modified_base 18: mod_base = OTHER; note = 2'-O-methyl modified nucleotide
  modified_base 19: mod_base = OTHER; note = 2'-O-methyl modified nucleotide
aagtcactcaattcctgaa

SEQ ID NO: 205 - RNA, 19 nt, synthetic construct
  source 1..19: mol_type = other RNA
  modified_base 1: mod_base = OTHER; note = 2'-O-methyl modified nucleotide with phosphorothioate linkage
  modified_base 2: mod_base = OTHER; note = 2'-O-methyl modified nucleotide with phosphorothioate linkage
  modified_base 3: mod_base = OTHER; note = 2'-O-methyl modified nucleotide
  modified_base 4: mod_base = OTHER; note = 2'-O-methyl modified nucleotide
  modified_base 5: mod_base = OTHER; note = 2'-fluoro modified nucleotide
  modified_base 6: mod_base = OTHER; note = 2'-O-methyl modified nucleotide
  modified_base 7: mod_base = OTHER; note = 2'-fluoro modified nucleotide
  modified_base 8: mod_base = OTHER; note = 2'-fluoro modified nucleotide
  modified_base 9: mod_base = OTHER; note = 2'-fluoro modified nucleotide
  modified_base 10: mod_base = OTHER; note = 2'-O-methyl modified nucleotide
  modified_base 11: mod_base = OTHER; note = 2'-O-methyl modified nucleotide
  modified_base 12: mod_base = OTHER; note = 2'-O-methyl modified nucleotide
  modified_base 13: mod_base = OTHER; note = 2'-O-methyl modified nucleotide
  modified_base 14: mod_base = OTHER; note = 2'-fluoro modified nucleotide
  modified_base 15: mod_base = OTHER; note = 2'-fluoro modified nucleotide
  modified_base 16: mod_base = OTHER; note = 2'-O-methyl modified nucleotide
  modified_base 17: mod_base = OTHER; note = 2'-O-methyl modified nucleotide
  modified_base 18: mod_base = OTHER; note = 2'-O-methyl modified nucleotide
  modified_base 19: mod_base = OTHER; note = 2'-O-methyl modified nucleotide
cctgaactaatcaatataa

SEQ ID NO: 206 - RNA, 19 nt, synthetic construct
  source 1..19: mol_type = other RNA
  modified_base 1: mod_base = OTHER; note = 2'-O-methyl modified nucleotide with phosphorothioate linkage
  modified_base 2: mod_base = OTHER; note = 2'-O-methyl modified nucleotide with phosphorothioate linkage
  modified_base 3: mod_base = OTHER; note = 2'-O-methyl modified nucleotide
  modified_base 4: mod_base = OTHER; note = 2'-O-methyl modified nucleotide
  modified_base 5: mod_base = OTHER; note = 2'-fluoro modified nucleotide
  modified_base 6: mod_base = OTHER; note = 2'-O-methyl modified nucleotide
  modified_base 7: mod_base = OTHER; note = 2'-fluoro modified nucleotide
  modified_base 8: mod_base = OTHER; note = 2'-fluoro modified nucleotide
  modified_base 9: mod_base = OTHER; note = 2'-fluoro modified nucleotide
  modified_base 10: mod_base = OTHER; note = 2'-O-methyl modified nucleotide
  modified_base 11: mod_base = OTHER; note = 2'-O-methyl modified nucleotide
  modified_base 12: mod_base = OTHER; note = 2'-O-methyl modified nucleotide
  modified_base 13: mod_base = OTHER; note = 2'-O-methyl modified nucleotide
  modified_base 14: mod_base = OTHER; note = 2'-fluoro modified nucleotide
  modified_base 15: mod_base = OTHER; note = 2'-fluoro modified nucleotide
  modified_base 16: mod_base = OTHER; note = 2'-O-methyl modified nucleotide
  modified_base 17: mod_base = OTHER; note = 2'-O-methyl modified nucleotide
  modified_base 18: mod_base = OTHER; note = 2'-O-methyl modified nucleotide
  modified_base 19: mod_base = OTHER; note = 2'-O-methyl modified nucleotide
tgaactaatcaatatataa

SEQ ID NO: 207 - RNA, 19 nt, synthetic construct
  source 1..19: mol_type = other RNA
  modified_base 1: mod_base = OTHER; note = 2'-O-methyl modified nucleotide with phosphorothioate linkage
  modified_base 2: mod_base = OTHER; note = 2'-O-methyl modified nucleotide with phosphorothioate linkage
  modified_base 3: mod_base = OTHER; note = 2'-O-methyl modified nucleotide
  modified_base 4: mod_base = OTHER; note = 2'-O-methyl modified nucleotide
  modified_base 5: mod_base = OTHER; note = 2'-fluoro modified nucleotide
  modified_base 6: mod_base = OTHER; note = 2'-O-methyl modified nucleotide
  modified_base 7: mod_base = OTHER; note = 2'-fluoro modified nucleotide
  modified_base 8: mod_base = OTHER; note = 2'-fluoro modified nucleotide
  modified_base 9: mod_base = OTHER; note = 2'-fluoro modified nucleotide
  modified_base 10: mod_base = OTHER; note = 2'-O-methyl modified nucleotide
  modified_base 11: mod_base = OTHER; note = 2'-O-methyl modified nucleotide
  modified_base 12: mod_base = OTHER; note = 2'-O-methyl modified nucleotide
  modified_base 13: mod_base = OTHER; note = 2'-O-methyl modified nucleotide
  modified_base 14: mod_base = OTHER; note = 2'-fluoro modified nucleotide
  modified_base 15: mod_base = OTHER; note = 2'-fluoro modified nucleotide
  modified_base 16: mod_base = OTHER; note = 2'-O-methyl modified nucleotide
  modified_base 17: mod_base = OTHER; note = 2'-O-methyl modified nucleotide
  modified_base 18: mod_base = OTHER; note = 2'-O-methyl modified nucleotide
  modified_base 19: mod_base = OTHER; note = 2'-O-methyl modified nucleotide
tggttctcattccttgcaa

SEQ ID NO: 208 - RNA, 19 nt, synthetic construct
  source 1..19: mol_type = other RNA
  modified_base 1: mod_base = OTHER; note = 2'-O-methyl modified nucleotide with phosphorothioate linkage
  modified_base 2: mod_base = OTHER; note = 2'-O-methyl modified nucleotide with phosphorothioate linkage
  modified_base 3: mod_base = OTHER; note = 2'-O-methyl modified nucleotide
  modified_base 4: mod_base = OTHER; note = 2'-O-methyl modified nucleotide
  modified_base 5: mod_base = OTHER; note = 2'-fluoro modified nucleotide
  modified_base 6: mod_base = OTHER; note = 2'-O-methyl modified nucleotide
  modified_base 7: mod_base = OTHER; note = 2'-fluoro modified nucleotide
  modified_base 8: mod_base = OTHER; note = 2'-fluoro modified nucleotide
  modified_base 9: mod_base = OTHER; note = 2'-fluoro modified nucleotide
  modified_base 10: mod_base = OTHER; note = 2'-O-methyl modified nucleotide
  modified_base 11: mod_base = OTHER; note = 2'-O-methyl modified nucleotide
  modified_base 12: mod_base = OTHER; note = 2'-O-methyl modified nucleotide
  modified_base 13: mod_base = OTHER; note = 2'-O-methyl modified nucleotide
  modified_base 14: mod_base = OTHER; note = 2'-fluoro modified nucleotide
  modified_base 15: mod_base = OTHER; note = 2'-fluoro modified nucleotide
  modified_base 16: mod_base = OTHER; note = 2'-O-methyl modified nucleotide
  modified_base 17: mod_base = OTHER; note = 2'-O-methyl modified nucleotide
  modified_base 18: mod_base = OTHER; note = 2'-O-methyl modified nucleotide
  modified_base 19: mod_base = OTHER; note = 2'-O-methyl modified nucleotide
ctcattccttgcaccataa

SEQ ID NO: 209 - RNA, 19 nt, synthetic construct
  source 1..19: mol_type = other RNA
  modified_base 1: mod_base = OTHER; note = 2'-O-methyl modified nucleotide with phosphorothioate linkage
  modified_base 2: mod_base = OTHER; note = 2'-O-methyl modified nucleotide with phosphorothioate linkage
  modified_base 3: mod_base = OTHER; note = 2'-O-methyl modified nucleotide
  modified_base 4: mod_base = OTHER; note = 2'-O-methyl modified nucleotide
  modified_base 5: mod_base = OTHER; note = 2'-fluoro modified nucleotide
  modified_base 6: mod_base = OTHER; note = 2'-O-methyl modified nucleotide
  modified_base 7: mod_base = OTHER; note = 2'-fluoro modified nucleotide
  modified_base 8: mod_base = OTHER; note = 2'-fluoro modified nucleotide
  modified_base 9: mod_base = OTHER; note = 2'-fluoro modified nucleotide
  modified_base 10: mod_base = OTHER; note = 2'-O-methyl modified nucleotide
  modified_base 11: mod_base = OTHER; note = 2'-O-methyl modified nucleotide
  modified_base 12: mod_base = OTHER; note = 2'-O-methyl modified nucleotide
  modified_base 13: mod_base = OTHER; note = 2'-O-methyl modified nucleotide
  modified_base 14: mod_base = OTHER; note = 2'-fluoro modified nucleotide
  modified_base 15: mod_base = OTHER; note = 2'-fluoro modified nucleotide
  modified_base 16: mod_base = OTHER; note = 2'-O-methyl modified nucleotide
  modified_base 17: mod_base = OTHER; note = 2'-O-methyl modified nucleotide
  modified_base 18: mod_base = OTHER; note = 2'-O-methyl modified nucleotide
  modified_base 19: mod_base = OTHER; note = 2'-O-methyl modified nucleotide
ttggctttctgctgggtta

SEQ ID NO: 210 - RNA, 19 nt, synthetic construct
  source 1..19: mol_type = other RNA
  modified_base 1: mod_base = OTHER; note = 2'-O-methyl modified nucleotide with phosphorothioate linkage
  modified_base 2: mod_base = OTHER; note = 2'-O-methyl modified nucleotide with phosphorothioate linkage
  modified_base 3: mod_base = OTHER; note = 2'-O-methyl modified nucleotide
  modified_base 4: mod_base = OTHER; note = 2'-O-methyl modified nucleotide
  modified_base 5: mod_base = OTHER; note = 2'-fluoro modified nucleotide
  modified_base 6: mod_base = OTHER; note = 2'-O-methyl modified nucleotide
  modified_base 7: mod_base = OTHER; note = 2'-fluoro modified nucleotide
  modified_base 8: mod_base = OTHER; note = 2'-fluoro modified nucleotide
  modified_base 9: mod_base = OTHER; note = 2'-fluoro modified nucleotide
  modified_base 10: mod_base = OTHER; note = 2'-O-methyl modified nucleotide
  modified_base 11: mod_base = OTHER; note = 2'-O-methyl modified nucleotide
  modified_base 12: mod_base = OTHER; note = 2'-O-methyl modified nucleotide
  modified_base 13: mod_base = OTHER; note = 2'-O-methyl modified nucleotide
  modified_base 14: mod_base = OTHER; note = 2'-fluoro modified nucleotide
  modified_base 15: mod_base = OTHER; note = 2'-fluoro modified nucleotide
  modified_base 16: mod_base = OTHER; note = 2'-O-methyl modified nucleotide
  modified_base 17: mod_base = OTHER; note = 2'-O-methyl modified nucleotide
  modified_base 18: mod_base = OTHER; note = 2'-O-methyl modified nucleotide
  modified_base 19: mod_base = OTHER; note = 2'-O-methyl modified nucleotide
tcctctacatgattttcca

SEQ ID NO: 211 - RNA, 19 nt, synthetic construct
  source 1..19: mol_type = other RNA
  modified_base 1: mod_base = OTHER; note = 2'-O-methyl modified nucleotide with phosphorothioate linkage
  modified_base 2: mod_base = OTHER; note = 2'-O-methyl modified nucleotide with phosphorothioate linkage
  modified_base 3: mod_base = OTHER; note = 2'-O-methyl modified nucleotide
  modified_base 4: mod_base = OTHER; note = 2'-O-methyl modified nucleotide
  modified_base 5: mod_base = OTHER; note = 2'-fluoro modified nucleotide
  modified_base 6: mod_base = OTHER; note = 2'-O-methyl modified nucleotide
  modified_base 7: mod_base = OTHER; note = 2'-fluoro modified nucleotide
  modified_base 8: mod_base = OTHER; note = 2'-fluoro modified nucleotide
  modified_base 9: mod_base = OTHER; note = 2'-fluoro modified nucleotide
  modified_base 10: mod_base = OTHER; note = 2'-O-methyl modified nucleotide
  modified_base 11: mod_base = OTHER; note = 2'-O-methyl modified nucleotide
  modified_base 12: mod_base = OTHER; note = 2'-O-methyl modified nucleotide
  modified_base 13: mod_base = OTHER; note = 2'-O-methyl modified nucleotide
  modified_base 14: mod_base = OTHER; note = 2'-fluoro modified nucleotide
  modified_base 15: mod_base = OTHER; note = 2'-fluoro modified nucleotide
  modified_base 16: mod_base = OTHER; note = 2'-O-methyl modified nucleotide
  modified_base 17: mod_base = OTHER; note = 2'-O-methyl modified nucleotide
  modified_base 18: mod_base = OTHER; note = 2'-O-methyl modified nucleotide
  modified_base 19: mod_base = OTHER; note = 2'-O-methyl modified nucleotide
agatcaaggctcacttata

SEQ ID NO: 212 - RNA, 19 nt, synthetic construct
  source 1..19: mol_type = other RNA
  modified_base 1: mod_base = OTHER; note = 2'-O-methyl modified nucleotide with phosphorothioate linkage
  modified_base 2: mod_base = OTHER; note = 2'-O-methyl modified nucleotide with phosphorothioate linkage
  modified_base 3: mod_base = OTHER; note = 2'-O-methyl modified nucleotide
  modified_base 4: mod_base = OTHER; note = 2'-O-methyl modified nucleotide
  modified_base 5: mod_base = OTHER; note = 2'-fluoro modified nucleotide
  modified_base 6: mod_base = OTHER; note = 2'-O-methyl modified nucleotide
  modified_base 7: mod_base = OTHER; note = 2'-fluoro modified nucleotide
  modified_base 8: mod_base = OTHER; note = 2'-fluoro modified nucleotide
  modified_base 9: mod_base = OTHER; note = 2'-fluoro modified nucleotide
  modified_base 10: mod_base = OTHER; note = 2'-O-methyl modified nucleotide
  modified_base 11: mod_base = OTHER; note = 2'-O-methyl modified nucleotide
  modified_base 12: mod_base = OTHER; note = 2'-O-methyl modified nucleotide
  modified_base 13: mod_base = OTHER; note = 2'-O-methyl modified nucleotide
  modified_base 14: mod_base = OTHER; note = 2'-fluoro modified nucleotide
  modified_base 15: mod_base = OTHER; note = 2'-fluoro modified nucleotide
  modified_base 16: mod_base = OTHER; note = 2'-O-methyl modified nucleotide
  modified_base 17: mod_base = OTHER; note = 2'-O-methyl modified nucleotide
  modified_base 18: mod_base = OTHER; note = 2'-O-methyl modified nucleotide
  modified_base 19: mod_base = OTHER; note = 2'-O-methyl modified nucleotide
tcagcattgtgatgaccaa

SEQ ID NO: 213 - RNA, 19 nt, synthetic construct
  source 1..19: mol_type = other RNA
  modified_base 1: mod_base = OTHER; note = 2'-O-methyl modified nucleotide with phosphorothioate linkage
  modified_base 2: mod_base = OTHER; note = 2'-O-methyl modified nucleotide with phosphorothioate linkage
  modified_base 3: mod_base = OTHER; note = 2'-O-methyl modified nucleotide
  modified_base 4: mod_base = OTHER; note = 2'-O-methyl modified nucleotide
  modified_base 5: mod_base = OTHER; note = 2'-fluoro modified nucleotide
  modified_base 6: mod_base = OTHER; note = 2'-O-methyl modified nucleotide
  modified_base 7: mod_base = OTHER; note = 2'-fluoro modified nucleotide
  modified_base 8: mod_base = OTHER; note = 2'-fluoro modified nucleotide
  modified_base 9: mod_base = OTHER; note = 2'-fluoro modified nucleotide
  modified_base 10: mod_base = OTHER; note = 2'-O-methyl modified nucleotide
  modified_base 11: mod_base = OTHER; note = 2'-O-methyl modified nucleotide
  modified_base 12: mod_base = OTHER; note = 2'-O-methyl modified nucleotide
  modified_base 13: mod_base = OTHER; note = 2'-O-methyl modified nucleotide
  modified_base 14: mod_base = OTHER; note = 2'-fluoro modified nucleotide
  modified_base 15: mod_base = OTHER; note = 2'-fluoro modified nucleotide
  modified_base 16: mod_base = OTHER; note = 2'-O-methyl modified nucleotide
  modified_base 17: mod_base = OTHER; note = 2'-O-methyl modified nucleotide
  modified_base 18: mod_base = OTHER; note = 2'-O-methyl modified nucleotide
  modified_base 19: mod_base = OTHER; note = 2'-O-methyl modified nucleotide
tcatcattctcttgtgcaa

SEQ ID NO: 214 - RNA, 19 nt, synthetic construct
  source 1..19: mol_type = other RNA
  modified_base 1: mod_base = OTHER; note = 2'-O-methyl modified nucleotide with phosphorothioate linkage
  modified_base 2: mod_base = OTHER; note = 2'-O-methyl modified nucleotide with phosphorothioate linkage
  modified_base 3: mod_base = OTHER; note = 2'-O-methyl modified nucleotide
  modified_base 4: mod_base = OTHER; note = 2'-O-methyl modified nucleotide
  modified_base 5: mod_base = OTHER; note = 2'-fluoro modified nucleotide
  modified_base 6: mod_base = OTHER; note = 2'-O-methyl modified nucleotide
  modified_base 7: mod_base = OTHER; note = 2'-fluoro modified nucleotide
  modified_base 8: mod_base = OTHER; note = 2'-fluoro modified nucleotide
  modified_base 9: mod_base = OTHER; note = 2'-fluoro modified nucleotide
  modified_base 10: mod_base = OTHER; note = 2'-O-methyl modified nucleotide
  modified_base 11: mod_base = OTHER; note = 2'-O-methyl modified nucleotide
  modified_base 12: mod_base = OTHER; note = 2'-O-methyl modified nucleotide
  modified_base 13: mod_base = OTHER; note = 2'-O-methyl modified nucleotide
  modified_base 14: mod_base = OTHER; note = 2'-fluoro modified nucleotide
  modified_base 15: mod_base = OTHER; note = 2'-fluoro modified nucleotide
  modified_base 16: mod_base = OTHER; note = 2'-O-methyl modified nucleotide
  modified_base 17: mod_base = OTHER; note = 2'-O-methyl modified nucleotide
  modified_base 18: mod_base = OTHER; note = 2'-O-methyl modified nucleotide
  modified_base 19: mod_base = OTHER; note = 2'-O-methyl modified nucleotide
tggccgtcacagttctcta

SEQ ID NO: 215 - RNA, 19 nt, synthetic construct
  source 1..19: mol_type = other RNA
  modified_base 1: mod_base = OTHER; note = 2'-O-methyl modified nucleotide with phosphorothioate linkage
  modified_base 2: mod_base = OTHER; note = 2'-O-methyl modified nucleotide with phosphorothioate linkage
  modified_base 3: mod_base = OTHER; note = 2'-O-methyl modified nucleotide
  modified_base 4: mod_base = OTHER; note = 2'-O-methyl modified nucleotide
  modified_base 5: mod_base = OTHER; note = 2'-fluoro modified nucleotide
  modified_base 6: mod_base = OTHER; note = 2'-O-methyl modified nucleotide
  modified_base 7: mod_base = OTHER; note = 2'-fluoro modified nucleotide
  modified_base 8: mod_base = OTHER; note = 2'-fluoro modified nucleotide
  modified_base 9: mod_base = OTHER; note = 2'-fluoro modified nucleotide
  modified_base 10: mod_base = OTHER; note = 2'-O-methyl modified nucleotide
  modified_base 11: mod_base = OTHER; note = 2'-O-methyl modified nucleotide
  modified_base 12: mod_base = OTHER; note = 2'-O-methyl modified nucleotide
  modified_base 13: mod_base = OTHER; note = 2'-O-methyl modified nucleotide
  modified_base 14: mod_base = OTHER; note = 2'-fluoro modified nucleotide
  modified_base 15: mod_base = OTHER; note = 2'-fluoro modified nucleotide
  modified_base 16: mod_base = OTHER; note = 2'-O-methyl modified nucleotide
  modified_base 17: mod_base = OTHER; note = 2'-O-methyl modified nucleotide
  modified_base 18: mod_base = OTHER; note = 2'-O-methyl modified nucleotide
  modified_base 19: mod_base = OTHER; note = 2'-O-methyl modified nucleotide
tggtcccaaagcaattcta

SEQ ID NO: 216 - RNA, 19 nt, synthetic construct
  source 1..19: mol_type = other RNA
  modified_base 1: mod_base = OTHER; note = 2'-O-methyl modified nucleotide with phosphorothioate linkage
  modified_base 2: mod_base = OTHER; note = 2'-O-methyl modified nucleotide with phosphorothioate linkage
  modified_base 3: mod_base = OTHER; note = 2'-O-methyl modified nucleotide
  modified_base 4: mod_base = OTHER; note = 2'-O-methyl modified nucleotide
  modified_base 5: mod_base = OTHER; note = 2'-fluoro modified nucleotide
  modified_base 6: mod_base = OTHER; note = 2'-O-methyl modified nucleotide
  modified_base 7: mod_base = OTHER; note = 2'-fluoro modified nucleotide
  modified_base 8: mod_base = OTHER; note = 2'-fluoro modified nucleotide
  modified_base 9: mod_base = OTHER; note = 2'-fluoro modified nucleotide
  modified_base 10: mod_base = OTHER; note = 2'-O-methyl modified nucleotide
  modified_base 11: mod_base = OTHER; note = 2'-O-methyl modified nucleotide
  modified_base 12: mod_base = OTHER; note = 2'-O-methyl modified nucleotide
  modified_base 13: mod_base = OTHER; note = 2'-O-methyl modified nucleotide
  modified_base 14: mod_base = OTHER; note = 2'-fluoro modified nucleotide
  modified_base 15: mod_base = OTHER; note = 2'-fluoro modified nucleotide
  modified_base 16: mod_base = OTHER; note = 2'-O-methyl modified nucleotide
  modified_base 17: mod_base = OTHER; note = 2'-O-methyl modified nucleotide
  modified_base 18: mod_base = OTHER; note = 2'-O-methyl modified nucleotide
  modified_base 19: mod_base = OTHER; note = 2'-O-methyl modified nucleotide
tccagtacatctatcagaa

SEQ ID NO: 217 - RNA, 19 nt, synthetic construct
  source 1..19: mol_type = other RNA
  modified_base 1: mod_base = OTHER; note = 2'-O-methyl modified nucleotide with phosphorothioate linkage
  modified_base 2: mod_base = OTHER; note = 2'-O-methyl modified nucleotide with phosphorothioate linkage
  modified_base 3: mod_base = OTHER; note = 2'-O-methyl modified nucleotide
  modified_base 4: mod_base = OTHER; note = 2'-O-methyl modified nucleotide
  modified_base 5: mod_base = OTHER; note = 2'-fluoro modified nucleotide
  modified_base 6: mod_base = OTHER; note = 2'-O-methyl modified nucleotide
  modified_base 7: mod_base = OTHER; note = 2'-fluoro modified nucleotide
  modified_base 8: mod_base = OTHER; note = 2'-fluoro modified nucleotide
  modified_base 9: mod_base = OTHER; note = 2'-fluoro modified nucleotide
  modified_base 10: mod_base = OTHER; note = 2'-O-methyl modified nucleotide
  modified_base 11: mod_base = OTHER; note = 2'-O-methyl modified nucleotide
  modified_base 12: mod_base = OTHER; note = 2'-O-methyl modified nucleotide
  modified_base 13: mod_base = OTHER; note = 2'-O-methyl modified nucleotide
  modified_base 14: mod_base = OTHER; note = 2'-fluoro modified nucleotide
  modified_base 15: mod_base = OTHER; note = 2'-fluoro modified nucleotide
  modified_base 16: mod_base = OTHER; note = 2'-O-methyl modified nucleotide
  modified_base 17: mod_base = OTHER; note = 2'-O-methyl modified nucleotide
  modified_base 18: mod_base = OTHER; note = 2'-O-methyl modified nucleotide
  modified_base 19: mod_base = OTHER; note = 2'-O-methyl modified nucleotide
ccagtacatctatcagaaa

SEQ ID NO: 218 - RNA, 19 nt, synthetic construct
  source 1..19: mol_type = other RNA
  modified_base 1: mod_base = OTHER; note = 2'-O-methyl modified nucleotide with phosphorothioate linkage
  modified_base 2: mod_base = OTHER; note = 2'-O-methyl modified nucleotide with phosphorothioate linkage
  modified_base 3: mod_base = OTHER; note = 2'-O-methyl modified nucleotide
  modified_base 4: mod_base = OTHER; note = 2'-O-methyl modified nucleotide
  modified_base 5: mod_base = OTHER; note = 2'-fluoro modified nucleotide
  modified_base 6: mod_base = OTHER; note = 2'-O-methyl modified nucleotide
  modified_base 7: mod_base = OTHER; note = 2'-fluoro modified nucleotide
  modified_base 8: mod_base = OTHER; note = 2'-fluoro modified nucleotide
  modified_base 9: mod_base = OTHER; note = 2'-fluoro modified nucleotide
  modified_base 10: mod_base = OTHER; note = 2'-O-methyl modified nucleotide
  modified_base 11: mod_base = OTHER; note = 2'-O-methyl modified nucleotide
  modified_base 12: mod_base = OTHER; note = 2'-O-methyl modified nucleotide
  modified_base 13: mod_base = OTHER; note = 2'-O-methyl modified nucleotide
  modified_base 14: mod_base = OTHER; note = 2'-fluoro modified nucleotide
  modified_base 15: mod_base = OTHER; note = 2'-fluoro modified nucleotide
  modified_base 16: mod_base = OTHER; note = 2'-O-methyl modified nucleotide
  modified_base 17: mod_base = OTHER; note = 2'-O-methyl modified nucleotide
  modified_base 18: mod_base = OTHER; note = 2'-O-methyl modified nucleotide
  modified_base 19: mod_base = OTHER; note = 2'-O-methyl modified nucleotide
atctatcagaatcatcaaa

SEQ ID NO: 219 - RNA, 19 nt, synthetic construct
  source 1..19: mol_type = other RNA
  modified_base 1: mod_base = OTHER; note = 2'-O-methyl modified nucleotide with phosphorothioate linkage
  modified_base 2: mod_base = OTHER; note = 2'-O-methyl modified nucleotide with phosphorothioate linkage
  modified_base 3: mod_base = OTHER; note = 2'-O-methyl modified nucleotide
  modified_base 4: mod_base = OTHER; note = 2'-O-methyl modified nucleotide
  modified_base 5: mod_base = OTHER; note = 2'-fluoro modified nucleotide
  modified_base 6: mod_base = OTHER; note = 2'-O-methyl modified nucleotide
  modified_base 7: mod_base = OTHER; note = 2'-fluoro modified nucleotide
  modified_base 8: mod_base = OTHER; note = 2'-fluoro modified nucleotide
  modified_base 9: mod_base = OTHER; note = 2'-fluoro modified nucleotide
  modified_base 10: mod_base = OTHER; note = 2'-O-methyl modified nucleotide
  modified_base 11: mod_base = OTHER; note = 2'-O-methyl modified nucleotide
  modified_base 12: mod_base = OTHER; note = 2'-O-methyl modified nucleotide
  modified_base 13: mod_base = OTHER; note = 2'-O-methyl modified nucleotide
  modified_base 14: mod_base = OTHER; note = 2'-fluoro modified nucleotide
  modified_base 15: mod_base = OTHER; note = 2'-fluoro modified nucleotide
  modified_base 16: mod_base = OTHER; note = 2'-O-methyl modified nucleotide
  modified_base 17: mod_base = OTHER; note = 2'-O-methyl modified nucleotide
  modified_base 18: mod_base = OTHER; note = 2'-O-methyl modified nucleotide
  modified_base 19: mod_base = OTHER; note = 2'-O-methyl modified nucleotide
aagtcactcaattcctgaa

SEQ ID NO: 220 - RNA, 19 nt, synthetic construct
  source 1..19: mol_type = other RNA
  modified_base 1: mod_base = OTHER; note = 2'-O-methyl modified nucleotide with phosphorothioate linkage
  modified_base 2: mod_base = OTHER; note = 2'-O-methyl modified nucleotide with phosphorothioate linkage
  modified_base 3: mod_base = OTHER; note = 2'-O-methyl modified nucleotide
  modified_base 4: mod_base = OTHER; note = 2'-O-methyl modified nucleotide
  modified_base 5: mod_base = OTHER; note = 2'-fluoro modified nucleotide
  modified_base 6: mod_base = OTHER; note = 2'-O-methyl modified nucleotide
  modified_base 7: mod_base = OTHER; note = 2'-fluoro modified nucleotide
  modified_base 8: mod_base = OTHER; note = 2'-fluoro modified nucleotide
  modified_base 9: mod_base = OTHER; note = 2'-fluoro modified nucleotide
  modified_base 10: mod_base = OTHER; note = 2'-O-methyl modified nucleotide
  modified_base 11: mod_base = OTHER; note = 2'-O-methyl modified nucleotide
  modified_base 12: mod_base = OTHER; note = 2'-O-methyl modified nucleotide
  modified_base 13: mod_base = OTHER; note = 2'-O-methyl modified nucleotide
  modified_base 14: mod_base = OTHER; note = 2'-fluoro modified nucleotide
  modified_base 15: mod_base = OTHER; note = 2'-fluoro modified nucleotide
  modified_base 16: mod_base = OTHER; note = 2'-O-methyl modified nucleotide
  modified_base 17: mod_base = OTHER; note = 2'-O-methyl modified nucleotide
  modified_base 18: mod_base = OTHER; note = 2'-O-methyl modified nucleotide
  modified_base 19: mod_base = OTHER; note = 2'-O-methyl modified nucleotide
cctgaactaatcaatataa

SEQ ID NO: 221 - RNA, 19 nt, synthetic construct
  source 1..19: mol_type = other RNA
  modified_base 1: mod_base = OTHER; note = 2'-O-methyl modified nucleotide with phosphorothioate linkage
  modified_base 2: mod_base = OTHER; note = 2'-O-methyl modified nucleotide with phosphorothioate linkage
  modified_base 3: mod_base = OTHER; note = 2'-O-methyl modified nucleotide
  modified_base 4: mod_base = OTHER; note = 2'-O-methyl modified nucleotide
  modified_base 5: mod_base = OTHER; note = 2'-fluoro modified nucleotide
  modified_base 6: mod_base = OTHER; note = 2'-O-methyl modified nucleotide
  modified_base 7: mod_base = OTHER; note = 2'-fluoro modified nucleotide
  modified_base 8: mod_base = OTHER; note = 2'-fluoro modified nucleotide
  modified_base 9: mod_base = OTHER; note = 2'-fluoro modified nucleotide
  modified_base 10: mod_base = OTHER; note = 2'-O-methyl modified nucleotide
  modified_base 11: mod_base = OTHER; note = 2'-O-methyl modified nucleotide
  modified_base 12: mod_base = OTHER; note = 2'-O-methyl modified nucleotide
  modified_base 13: mod_base = OTHER; note = 2'-O-methyl modified nucleotide
  modified_base 14: mod_base = OTHER; note = 2'-fluoro modified nucleotide
  modified_base 15: mod_base = OTHER; note = 2'-fluoro modified nucleotide
  modified_base 16: mod_base = OTHER; note = 2'-O-methyl modified nucleotide
  modified_base 17: mod_base = OTHER; note = 2'-O-methyl modified nucleotide
  modified_base 18: mod_base = OTHER; note = 2'-O-methyl modified nucleotide
  modified_base 19: mod_base = OTHER; note = 2'-O-methyl modified nucleotide
tgaactaatcaatatataa

SEQ ID NO: 222 - RNA, 19 nt, synthetic construct
  source 1..19: mol_type = other RNA
  modified_base 1: mod_base = OTHER; note = 2'-O-methyl modified nucleotide with phosphorothioate linkage
  modified_base 2: mod_base = OTHER; note = 2'-O-methyl modified nucleotide with phosphorothioate linkage
  modified_base 3: mod_base = OTHER; note = 2'-O-methyl modified nucleotide
  modified_base 4: mod_base = OTHER; note = 2'-O-methyl modified nucleotide
  modified_base 5: mod_base = OTHER; note = 2'-fluoro modified nucleotide
  modified_base 6: mod_base = OTHER; note = 2'-O-methyl modified nucleotide
  modified_base 7: mod_base = OTHER; note = 2'-fluoro modified nucleotide
  modified_base 8: mod_base = OTHER; note = 2'-fluoro modified nucleotide
  modified_base 9: mod_base = OTHER; note = 2'-fluoro modified nucleotide
  modified_base 10: mod_base = OTHER; note = 2'-O-methyl modified nucleotide
  modified_base 11: mod_base = OTHER; note = 2'-O-methyl modified nucleotide
  modified_base 12: mod_base = OTHER; note = 2'-O-methyl modified nucleotide
  modified_base 13: mod_base = OTHER; note = 2'-O-methyl modified nucleotide
  modified_base 14: mod_base = OTHER; note = 2'-fluoro modified nucleotide
  modified_base 15: mod_base = OTHER; note = 2'-fluoro modified nucleotide
  modified_base 16: mod_base = OTHER; note = 2'-O-methyl modified nucleotide
  modified_base 17: mod_base = OTHER; note = 2'-O-methyl modified nucleotide
  modified_base 18: mod_base = OTHER; note = 2'-O-methyl modified nucleotide
  modified_base 19: mod_base = OTHER; note = 2'-O-methyl modified nucleotide
tggttctcattccttgcaa

SEQ ID NO: 223 - RNA, 19 nt, synthetic construct
  source 1..19: mol_type = other RNA
  modified_base 1: mod_base = OTHER; note = 2'-O-methyl modified nucleotide with phosphorothioate linkage
  modified_base 2: mod_base = OTHER; note = 2'-O-methyl modified nucleotide with phosphorothioate linkage
  modified_base 3: mod_base = OTHER; note = 2'-O-methyl modified nucleotide
  modified_base 4: mod_base = OTHER; note = 2'-O-methyl modified nucleotide
  modified_base 5: mod_base = OTHER; note = 2'-fluoro modified nucleotide
  modified_base 6: mod_base = OTHER; note = 2'-O-methyl modified nucleotide
  modified_base 7: mod_base = OTHER; note = 2'-fluoro modified nucleotide
  modified_base 8: mod_base = OTHER; note = 2'-fluoro modified nucleotide
  modified_base 9: mod_base = OTHER; note = 2'-fluoro modified nucleotide
  modified_base 10: mod_base = OTHER; note = 2'-O-methyl modified nucleotide
  modified_base 11: mod_base = OTHER; note = 2'-O-methyl modified nucleotide
  modified_base 12: mod_base = OTHER; note = 2'-O-methyl modified nucleotide
  modified_base 13: mod_base = OTHER; note = 2'-O-methyl modified nucleotide
  modified_base 14: mod_base = OTHER; note = 2'-fluoro modified nucleotide
  modified_base 15: mod_base = OTHER; note = 2'-fluoro modified nucleotide
  modified_base 16: mod_base = OTHER; note = 2'-O-methyl modified nucleotide
  modified_base 17: mod_base = OTHER; note = 2'-O-methyl modified nucleotide
  modified_base 18: mod_base = OTHER; note = 2'-O-methyl modified nucleotide
  modified_base 19: mod_base = OTHER; note = 2'-O-methyl modified nucleotide
ctcattccttgcaccataa

SEQ ID NO: 224 - RNA, 19 nt, synthetic construct
  source 1..19: mol_type = other RNA
  modified_base 1: mod_base = OTHER; note = 2'-O-methyl modified nucleotide with phosphorothioate linkage
  modified_base 2: mod_base = OTHER; note = 2'-O-methyl modified nucleotide with phosphorothioate linkage
  modified_base 3: mod_base = OTHER; note = 2'-O-methyl modified nucleotide
  modified_base 4: mod_base = OTHER; note = 2'-O-methyl modified nucleotide
  modified_base 5: mod_base = OTHER; note = 2'-fluoro modified nucleotide
  modified_base 6: mod_base = OTHER; note = 2'-O-methyl modified nucleotide
  modified_base 7: mod_base = OTHER; note = 2'-fluoro modified nucleotide
  modified_base 8: mod_base = OTHER; note = 2'-fluoro modified nucleotide
  modified_base 9: mod_base = OTHER; note = 2'-fluoro modified nucleotide
  modified_base 10: mod_base = OTHER; note = 2'-O-methyl modified nucleotide
  modified_base 11: mod_base = OTHER; note = 2'-O-methyl modified nucleotide
  modified_base 12: mod_base = OTHER; note = 2'-O-methyl modified nucleotide
  modified_base 13: mod_base = OTHER; note = 2'-O-methyl modified nucleotide
  modified_base 14: mod_base = OTHER; note = 2'-fluoro modified nucleotide
  modified_base 15: mod_base = OTHER; note = 2'-fluoro modified nucleotide
  modified_base 16: mod_base = OTHER; note = 2'-O-methyl modified nucleotide
  modified_base 17: mod_base = OTHER; note = 2'-O-methyl modified nucleotide
  modified_base 18: mod_base = OTHER; note = 2'-O-methyl modified nucleotide
  modified_base 19: mod_base = OTHER; note = 2'-O-methyl modified nucleotide
ttggctttctgctgggtta

SEQ ID NO: 225 - RNA, 19 nt, synthetic construct
  source 1..19: mol_type = other RNA
  modified_base 1: mod_base = OTHER; note = 2'-O-methyl modified nucleotide with phosphorothioate linkage
  modified_base 2: mod_base = OTHER; note = 2'-O-methyl modified nucleotide with phosphorothioate linkage
  modified_base 3: mod_base = OTHER; note = 2'-O-methyl modified nucleotide
  modified_base 4: mod_base = OTHER; note = 2'-O-methyl modified nucleotide
  modified_base 5: mod_base = OTHER; note = 2'-fluoro modified nucleotide
  modified_base 6: mod_base = OTHER; note = 2'-O-methyl modified nucleotide
  modified_base 7: mod_base = OTHER; note = 2'-fluoro modified nucleotide
  modified_base 8: mod_base = OTHER; note = 2'-fluoro modified nucleotide
  modified_base 9: mod_base = OTHER; note = 2'-fluoro modified nucleotide
  modified_base 10: mod_base = OTHER; note = 2'-O-methyl modified nucleotide
  modified_base 11: mod_base = OTHER; note = 2'-O-methyl modified nucleotide
  modified_base 12: mod_base = OTHER; note = 2'-O-methyl modified nucleotide
  modified_base 13: mod_base = OTHER; note = 2'-O-methyl modified nucleotide
  modified_base 14: mod_base = OTHER; note = 2'-fluoro modified nucleotide
  modified_base 15: mod_base = OTHER; note = 2'-fluoro modified nucleotide
  modified_base 16: mod_base = OTHER; note = 2'-O-methyl modified nucleotide
  modified_base 17: mod_base = OTHER; note = 2'-O-methyl modified nucleotide
  modified_base 18: mod_base = OTHER; note = 2'-O-methyl modified nucleotide
  modified_base 19: mod_base = OTHER; note = 2'-O-methyl modified nucleotide
tcctctacatgattttcca

SEQ ID NO: 226 - RNA, 21 nt, synthetic construct
  source 1..21: mol_type = other RNA
  modified_base 1: mod_base = OTHER; note = 2'-O-methyl modified nucleotide with phosphorothioate linkage
  modified_base 2: mod_base = OTHER; note = 2'-O-methyl modified nucleotide with phosphorothioate linkage
  modified_base 3: mod_base = OTHER; note = 2'-O-methyl modified nucleotide
  modified_base 4: mod_base = OTHER; note = 2'-O-methyl modified nucleotide
  modified_base 5: mod_base = OTHER; note = 2'-fluoro modified nucleotide
  modified_base 6: mod_base = OTHER; note = 2'-O-methyl modified nucleotide
  modified_base 7: mod_base = OTHER; note = 2'-fluoro modified nucleotide
  modified_base 8: mod_base = OTHER; note = 2'-O-methyl modified nucleotide
  modified_base 9: mod_base = OTHER; note = 2'-fluoro modified nucleotide
  modified_base 10: mod_base = OTHER; note = 2'-fluoro modified nucleotide
  modified_base 11: mod_base = OTHER; note = 2'-fluoro modified nucleotide
  modified_base 12: mod_base = OTHER; note = 2'-O-methyl modified nucleotide
  modified_base 13: mod_base = OTHER; note = 2'-O-methyl modified nucleotide
  modified_base 14: mod_base = OTHER; note = 2'-O-methyl modified nucleotide
  modified_base 15: mod_base = OTHER; note = 2'-O-methyl modified nucleotide
  modified_base 16: mod_base = OTHER; note = 2'-fluoro modified nucleotide
  modified_base 17: mod_base = OTHER; note = 2'-O-methyl modified nucleotide
  modified_base 18: mod_base = OTHER; note = 2'-O-methyl modified nucleotide
  modified_base 19: mod_base = OTHER; note = 2'-O-methyl modified nucleotide
  modified_base 20: mod_base = OTHER; note = 2'-O-methyl modified nucleotide
  modified_base 21: mod_base = OTHER; note = 2'-O-methyl modified nucleotide
caagatcaaggctcacttata

SEQ ID NO: 227 - RNA, 21 nt, synthetic construct
  source 1..21: mol_type = other RNA
  modified_base 1: mod_base = OTHER; note = 2'-O-methyl modified nucleotide with phosphorothioate linkage
  modified_base 2: mod_base = OTHER; note = 2'-O-methyl modified nucleotide with phosphorothioate linkage
  modified_base 3: mod_base = OTHER; note = 2'-O-methyl modified nucleotide
  modified_base 4: mod_base = OTHER; note = 2'-O-methyl modified nucleotide
  modified_base 5: mod_base = OTHER; note = 2'-fluoro modified nucleotide
  modified_base 6: mod_base = OTHER; note = 2'-O-methyl modified nucleotide
  modified_base 7: mod_base = OTHER; note = 2'-fluoro modified nucleotide
  modified_base 8: mod_base = OTHER; note = 2'-O-methyl modified nucleotide
  modified_base 9: mod_base = OTHER; note = 2'-fluoro modified nucleotide
  modified_base 10: mod_base = OTHER; note = 2'-fluoro modified nucleotide
  modified_base 11: mod_base = OTHER; note = 2'-fluoro modified nucleotide
  modified_base 12: mod_base = OTHER; note = 2'-O-methyl modified nucleotide
  modified_base 13: mod_base = OTHER; note = 2'-O-methyl modified nucleotide
  modified_base 14: mod_base = OTHER; note = 2'-O-methyl modified nucleotide
  modified_base 15: mod_base = OTHER; note = 2'-O-methyl modified nucleotide
  modified_base 16: mod_base = OTHER; note = 2'-fluoro modified nucleotide
  modified_base 17: mod_base = OTHER; note = 2'-O-methyl modified nucleotide
  modified_base 18: mod_base = OTHER; note = 2'-O-methyl modified nucleotide
  modified_base 19: mod_base = OTHER; note = 2'-O-methyl modified nucleotide
  modified_base 20: mod_base = OTHER; note = 2'-O-methyl modified nucleotide
  modified_base 21: mod_base = OTHER; note = 2'-O-methyl modified nucleotide
cctcagcattgtgatgaccaa

SEQ ID NO: 228 - RNA, 21 nt, synthetic construct
  source 1..21: mol_type = other RNA
  modified_base 1: mod_base = OTHER; note = 2'-O-methyl modified nucleotide with phosphorothioate linkage
  modified_base 2: mod_base = OTHER; note = 2'-O-methyl modified nucleotide with phosphorothioate linkage
  modified_base 3: mod_base = OTHER; note = 2'-O-methyl modified nucleotide
  modified_base 4: mod_base = OTHER; note = 2'-O-methyl modified nucleotide
  modified_base 5: mod_base = OTHER; note = 2'-fluoro modified nucleotide
  modified_base 6: mod_base = OTHER; note = 2'-O-methyl modified nucleotide
  modified_base 7: mod_base = OTHER; note = 2'-fluoro modified nucleotide
  modified_base 8: mod_base = OTHER; note = 2'-O-methyl modified nucleotide
  modified_base 9: mod_base = OTHER; note = 2'-fluoro modified nucleotide
  modified_base 10: mod_base = OTHER; note = 2'-fluoro modified nucleotide
  modified_base 11: mod_base = OTHER; note = 2'-fluoro modified nucleotide
  modified_base 12: mod_base = OTHER; note = 2'-O-methyl modified nucleotide
  modified_base 13: mod_base = OTHER; note = 2'-O-methyl modified nucleotide
  modified_base 14: mod_base = OTHER; note = 2'-O-methyl modified nucleotide
  modified_base 15: mod_base = OTHER; note = 2'-O-methyl modified nucleotide
  modified_base 16: mod_base = OTHER; note = 2'-fluoro modified nucleotide
  modified_base 17: mod_base = OTHER; note = 2'-O-methyl modified nucleotide
  modified_base 18: mod_base = OTHER; note = 2'-O-methyl modified nucleotide
  modified_base 19: mod_base = OTHER; note = 2'-O-methyl modified nucleotide
  modified_base 20: mod_base = OTHER; note = 2'-O-methyl modified nucleotide
  modified_base 21: mod_base = OTHER; note = 2'-O-methyl modified nucleotide
gatcatcattctcttgtgcaa

SEQ ID NO: 229 - RNA, 21 nt, synthetic construct
  source 1..21: mol_type = other RNA
  modified_base 1: mod_base = OTHER; note = 2'-O-methyl modified nucleotide with phosphorothioate linkage
  modified_base 2: mod_base = OTHER; note = 2'-O-methyl modified nucleotide with phosphorothioate linkage
  modified_base 3: mod_base = OTHER; note = 2'-O-methyl modified nucleotide
  modified_base 4: mod_base = OTHER; note = 2'-O-methyl modified nucleotide
  modified_base 5: mod_base = OTHER; note = 2'-fluoro modified nucleotide
  modified_base 6: mod_base = OTHER; note = 2'-O-methyl modified nucleotide
  modified_base 7: mod_base = OTHER; note = 2'-fluoro modified nucleotide
  modified_base 8: mod_base = OTHER; note = 2'-O-methyl modified nucleotide
  modified_base 9: mod_base = OTHER; note = 2'-fluoro modified nucleotide
  modified_base 10: mod_base = OTHER; note = 2'-fluoro modified nucleotide
  modified_base 11: mod_base = OTHER; note = 2'-fluoro modified nucleotide
  modified_base 12: mod_base = OTHER; note = 2'-O-methyl modified nucleotide
  modified_base 13: mod_base = OTHER; note = 2'-O-methyl modified nucleotide
  modified_base 14: mod_base = OTHER; note = 2'-O-methyl modified nucleotide
  modified_base 15: mod_base = OTHER; note = 2'-O-methyl modified nucleotide
  modified_base 16: mod_base = OTHER; note = 2'-fluoro modified nucleotide
  modified_base 17: mod_base = OTHER; note = 2'-O-methyl modified nucleotide
  modified_base 18: mod_base = OTHER; note = 2'-O-methyl modified nucleotide
  modified_base 19: mod_base = OTHER; note = 2'-O-methyl modified nucleotide
  modified_base 20: mod_base = OTHER; note = 2'-O-methyl modified nucleotide
  modified_base 21: mod_base = OTHER; note = 2'-O-methyl modified nucleotide
tgtggccgtcacagttctcta

SEQ ID NO: 230 - RNA, 21 nt, synthetic construct
  source 1..21: mol_type = other RNA
  modified_base 1: mod_base = OTHER; note = 2'-O-methyl modified nucleotide with phosphorothioate linkage
  modified_base 2: mod_base = OTHER; note = 2'-O-methyl modified nucleotide with phosphorothioate linkage
  modified_base 3: mod_base = OTHER; note = 2'-O-methyl modified nucleotide
  modified_base 4: mod_base = OTHER; note = 2'-O-methyl modified nucleotide
  modified_base 5: mod_base = OTHER; note = 2'-fluoro modified nucleotide
  modified_base 6: mod_base = OTHER; note = 2'-O-methyl modified nucleotide
  modified_base 7: mod_base = OTHER; note = 2'-fluoro modified nucleotide
  modified_base 8: mod_base = OTHER; note = 2'-O-methyl modified nucleotide
  modified_base 9: mod_base = OTHER; note = 2'-fluoro modified nucleotide
  modified_base 10: mod_base = OTHER; note = 2'-fluoro modified nucleotide
  modified_base 11: mod_base = OTHER; note = 2'-fluoro modified nucleotide
  modified_base 12: mod_base = OTHER; note = 2'-O-methyl modified nucleotide
  modified_base 13: mod_base = OTHER; note = 2'-O-methyl modified nucleotide
  modified_base 14: mod_base = OTHER; note = 2'-O-methyl modified nucleotide
  modified_base 15: mod_base = OTHER; note = 2'-O-methyl modified nucleotide
  modified_base 16: mod_base = OTHER; note = 2'-fluoro modified nucleotide
  modified_base 17: mod_base = OTHER; note = 2'-O-methyl modified nucleotide
  modified_base 18: mod_base = OTHER; note = 2'-O-methyl modified nucleotide
  modified_base 19: mod_base = OTHER; note = 2'-O-methyl modified nucleotide
  modified_base 20: mod_base = OTHER; note = 2'-O-methyl modified nucleotide
  modified_base 21: mod_base = OTHER; note = 2'-O-methyl modified nucleotide
tctggtcccaaagcaattcta

SEQ ID NO: 231 - RNA, 21 nt, synthetic construct
  source 1..21: mol_type = other RNA
  modified_base 1: mod_base = OTHER; note = 2'-O-methyl modified nucleotide with phosphorothioate linkage
  modified_base 2: mod_base = OTHER; note = 2'-O-methyl modified nucleotide with phosphorothioate linkage
  modified_base 3: mod_base = OTHER; note = 2'-O-methyl modified nucleotide
  modified_base 4: mod_base = OTHER; note = 2'-O-methyl modified nucleotide
  modified_base 5: mod_base = OTHER; note = 2'-fluoro modified nucleotide
  modified_base 6: mod_base = OTHER; note = 2'-O-methyl modified nucleotide
  modified_base 7: mod_base = OTHER; note = 2'-fluoro modified nucleotide
  modified_base 8: mod_base = OTHER; note = 2'-O-methyl modified nucleotide
  modified_base 9: mod_base = OTHER; note = 2'-fluoro modified nucleotide
  modified_base 10: mod_base = OTHER; note = 2'-fluoro modified nucleotide
  modified_base 11: mod_base = OTHER; note = 2'-fluoro modified nucleotide
  modified_base 12: mod_base = OTHER; note = 2'-O-methyl modified nucleotide
  modified_base 13: mod_base = OTHER; note = 2'-O-methyl modified nucleotide
  modified_base 14: mod_base = OTHER; note = 2'-O-methyl modified nucleotide
  modified_base 15: mod_base = OTHER; note = 2'-O-methyl modified nucleotide
  modified_base 16: mod_base = OTHER; note = 2'-fluoro modified nucleotide
  modified_base 17: mod_base = OTHER; note = 2'-O-methyl modified nucleotide
  modified_base 18: mod_base = OTHER; note = 2'-O-methyl modified nucleotide
  modified_base 19: mod_base = OTHER; note = 2'-O-methyl modified nucleotide
  modified_base 20: mod_base = OTHER; note = 2'-O-methyl modified nucleotide
  modified_base 21: mod_base = OTHER; note = 2'-O-methyl modified nucleotide
tttccagtacatctatcagaa

SEQ ID NO: 232 - RNA, 21 nt, synthetic construct
  source 1..21: mol_type = other RNA
  modified_base 1: mod_base = OTHER; note = 2'-O-methyl modified nucleotide with phosphorothioate linkage
  modified_base 2: mod_base = OTHER; note = 2'-O-methyl modified nucleotide with phosphorothioate linkage
  modified_base 3: mod_base = OTHER; note = 2'-O-methyl modified nucleotide
  modified_base 4: mod_base = OTHER; note = 2'-O-methyl modified nucleotide
  modified_base 5: mod_base = OTHER; note = 2'-fluoro modified nucleotide
  modified_base 6: mod_base = OTHER; note = 2'-O-methyl modified nucleotide
  modified_base 7: mod_base = OTHER; note = 2'-fluoro modified nucleotide
  modified_base 8: mod_base = OTHER; note = 2'-O-methyl modified nucleotide
  modified_base 9: mod_base = OTHER; note = 2'-fluoro modified nucleotide
  modified_base 10: mod_base = OTHER; note = 2'-fluoro modified nucleotide
  modified_base 11: mod_base = OTHER; note = 2'-fluoro modified nucleotide
  modified_base 12: mod_base = OTHER; note = 2'-O-methyl modified nucleotide
  modified_base 13: mod_base = OTHER; note = 2'-O-methyl modified nucleotide
  modified_base 14: mod_base = OTHER; note = 2'-O-methyl modified nucleotide
  modified_base 15: mod_base = OTHER; note = 2'-O-methyl modified nucleotide
  modified_base 16: mod_base = OTHER; note = 2'-fluoro modified nucleotide
  modified_base 17: mod_base = OTHER; note = 2'-O-methyl modified nucleotide
  modified_base 18: mod_base = OTHER; note = 2'-O-methyl modified nucleotide
  modified_base 19: mod_base = OTHER; note = 2'-O-methyl modified nucleotide
  modified_base 20: mod_base = OTHER; note = 2'-O-methyl modified nucleotide
  modified_base 21: mod_base = OTHER; note = 2'-O-methyl modified nucleotide
ttccagtacatctatcagaaa

SEQ ID NO: 233 - RNA, 21 nt, synthetic construct
  source 1..21: mol_type = other RNA
  modified_base 1: mod_base = OTHER; note = 2'-O-methyl modified nucleotide with phosphorothioate linkage
  modified_base 2: mod_base = OTHER; note = 2'-O-methyl modified nucleotide with phosphorothioate linkage
  modified_base 3: mod_base = OTHER; note = 2'-O-methyl modified nucleotide
  modified_base 4: mod_base = OTHER; note = 2'-O-methyl modified nucleotide
  modified_base 5: mod_base = OTHER; note = 2'-fluoro modified nucleotide
  modified_base 6: mod_base = OTHER; note = 2'-O-methyl modified nucleotide
  modified_base 7: mod_base = OTHER; note = 2'-fluoro modified nucleotide
  modified_base 8: mod_base = OTHER; note = 2'-O-methyl modified nucleotide
  modified_base 9: mod_base = OTHER; note = 2'-fluoro modified nucleotide
  modified_base 10: mod_base = OTHER; note = 2'-fluoro modified nucleotide
  modified_base 11: mod_base = OTHER; note = 2'-fluoro modified nucleotide
  modified_base 12: mod_base = OTHER; note = 2'-O-methyl modified nucleotide
  modified_base 13: mod_base = OTHER; note = 2'-O-methyl modified nucleotide
  modified_base 14: mod_base = OTHER; note = 2'-O-methyl modified nucleotide
  modified_base 15: mod_base = OTHER; note = 2'-O-methyl modified nucleotide
  modified_base 16: mod_base = OTHER; note = 2'-fluoro modified nucleotide
  modified_base 17: mod_base = OTHER; note = 2'-O-methyl modified nucleotide
  modified_base 18: mod_base = OTHER; note = 2'-O-methyl modified nucleotide
  modified_base 19: mod_base = OTHER; note = 2'-O-methyl modified nucleotide
  modified_base 20: mod_base = OTHER; note = 2'-O-methyl modified nucleotide
  modified_base 21: mod_base = OTHER; note = 2'-O-methyl modified nucleotide
acatctatcagaatcatcaaa

SEQ ID NO: 234 - RNA, 21 nt, synthetic construct
  source 1..21: mol_type = other RNA
  modified_base 1: mod_base = OTHER; note = 2'-O-methyl modified nucleotide with phosphorothioate linkage
  modified_base 2: mod_base = OTHER; note = 2'-O-methyl modified nucleotide with phosphorothioate linkage
  modified_base 3: mod_base = OTHER; note = 2'-O-methyl modified nucleotide
  modified_base 4: mod_base = OTHER; note = 2'-O-methyl modified nucleotide
  modified_base 5: mod_base = OTHER; note = 2'-fluoro modified nucleotide
  modified_base 6: mod_base = OTHER; note = 2'-O-methyl modified nucleotide
  modified_base 7: mod_base = OTHER; note = 2'-fluoro modified nucleotide
  modified_base 8: mod_base = OTHER; note = 2'-O-methyl modified nucleotide
  modified_base 9: mod_base = OTHER; note = 2'-fluoro modified nucleotide
  modified_base 10: mod_base = OTHER; note = 2'-fluoro modified nucleotide
  modified_base 11: mod_base = OTHER; note = 2'-fluoro modified nucleotide
  modified_base 12: mod_base = OTHER; note = 2'-O-methyl modified nucleotide
  modified_base 13: mod_base = OTHER; note = 2'-O-methyl modified nucleotide
  modified_base 14: mod_base = OTHER; note = 2'-O-methyl modified nucleotide
  modified_base 15: mod_base = OTHER; note = 2'-O-methyl modified nucleotide
  modified_base 16: mod_base = OTHER; note = 2'-fluoro modified nucleotide
  modified_base 17: mod_base = OTHER; note = 2'-O-methyl modified nucleotide
  modified_base 18: mod_base = OTHER; note = 2'-O-methyl modified nucleotide
  modified_base 19: mod_base = OTHER; note = 2'-O-methyl modified nucleotide
  modified_base 20: mod_base = OTHER; note = 2'-O-methyl modified nucleotide
  modified_base 21: mod_base = OTHER; note = 2'-O-methyl modified nucleotide
taaagtcactcaattcctgaa

SEQ ID NO: 235 - RNA, 21 nt, synthetic construct
  source 1..21: mol_type = other RNA
  modified_base 1: mod_base = OTHER; note = 2'-O-methyl modified nucleotide with phosphorothioate linkage
  modified_base 2: mod_base = OTHER; note = 2'-O-methyl modified nucleotide with phosphorothioate linkage
  modified_base 3: mod_base = OTHER; note = 2'-O-methyl modified nucleotide
  modified_base 4: mod_base = OTHER; note = 2'-O-methyl modified nucleotide
  modified_base 5: mod_base = OTHER; note = 2'-fluoro modified nucleotide
  modified_base 6: mod_base = OTHER; note = 2'-O-methyl modified nucleotide
  modified_base 7: mod_base = OTHER; note = 2'-fluoro modified nucleotide
  modified_base 8: mod_base = OTHER; note = 2'-O-methyl modified nucleotide
  modified_base 9: mod_base = OTHER; note = 2'-fluoro modified nucleotide
  modified_base 10: mod_base = OTHER; note = 2'-fluoro modified nucleotide
  modified_base 11: mod_base = OTHER; note = 2'-fluoro modified nucleotide
  modified_base 12: mod_base = OTHER; note = 2'-O-methyl modified nucleotide
  modified_base 13: mod_base = OTHER; note = 2'-O-methyl modified nucleotide
  modified_base 14: mod_base = OTHER; note = 2'-O-methyl modified nucleotide
  modified_base 15: mod_base = OTHER; note = 2'-O-methyl modified nucleotide
  modified_base 16: mod_base = OTHER; note = 2'-fluoro modified nucleotide
  modified_base 17: mod_base = OTHER; note = 2'-O-methyl modified nucleotide
  modified_base 18: mod_base = OTHER; note = 2'-O-methyl modified nucleotide
  modified_base 19: mod_base = OTHER; note = 2'-O-methyl modified nucleotide
  modified_base 20: mod_base = OTHER; note = 2'-O-methyl modified nucleotide
  modified_base 21: mod_base = OTHER; note = 2'-O-methyl modified nucleotide
ttcctgaactaatcaatataa

SEQ ID NO: 236 - RNA, 21 nt, synthetic construct
  source 1..21: mol_type = other RNA
  modified_base 1: mod_base = OTHER; note = 2'-O-methyl modified nucleotide with phosphorothioate linkage
  modified_base 2: mod_base = OTHER; note = 2'-O-methyl modified nucleotide with phosphorothioate linkage
  modified_base 3: mod_base = OTHER; note = 2'-O-methyl modified nucleotide
  modified_base 4: mod_base = OTHER; note = 2'-O-methyl modified nucleotide
  modified_base 5: mod_base = OTHER; note = 2'-fluoro modified nucleotide
  modified_base 6: mod_base = OTHER; note = 2'-O-methyl modified nucleotide
  modified_base 7: mod_base = OTHER; note = 2'-fluoro modified nucleotide
  modified_base 8: mod_base = OTHER; note = 2'-O-methyl modified nucleotide
  modified_base 9: mod_base = OTHER; note = 2'-fluoro modified nucleotide
  modified_base 10: mod_base = OTHER; note = 2'-fluoro modified nucleotide
  modified_base 11: mod_base = OTHER; note = 2'-fluoro modified nucleotide
  modified_base 12: mod_base = OTHER; note = 2'-O-methyl modified nucleotide
  modified_base 13: mod_base = OTHER; note = 2'-O-methyl modified nucleotide
  modified_base 14: mod_base = OTHER; note = 2'-O-methyl modified nucleotide
  modified_base 15: mod_base = OTHER; note = 2'-O-methyl modified nucleotide
  modified_base 16: mod_base = OTHER; note = 2'-fluoro modified nucleotide
  modified_base 17: mod_base = OTHER; note = 2'-O-methyl modified nucleotide
  modified_base 18: mod_base = OTHER; note = 2'-O-methyl modified nucleotide
  modified_base 19: mod_base = OTHER; note = 2'-O-methyl modified nucleotide
  modified_base 20: mod_base = OTHER; note = 2'-O-methyl modified nucleotide
  modified_base 21: mod_base = OTHER; note = 2'-O-methyl modified nucleotide
cctgaactaatcaatatataa

SEQ ID NO: 237 - RNA, 21 nt, synthetic construct
  source 1..21: mol_type = other RNA
  modified_base 1: mod_base = OTHER; note = 2'-O-methyl modified nucleotide with phosphorothioate linkage
  modified_base 2: mod_base = OTHER; note = 2'-O-methyl modified nucleotide with phosphorothioate linkage
  modified_base 3: mod_base = OTHER; note = 2'-O-methyl modified nucleotide
  modified_base 4: mod_base = OTHER; note = 2'-O-methyl modified nucleotide
  modified_base 5: mod_base = OTHER; note = 2'-fluoro modified nucleotide
  modified_base 6: mod_base = OTHER; note = 2'-O-methyl modified nucleotide
  modified_base 7: mod_base = OTHER; note = 2'-fluoro modified nucleotide
  modified_base 8: mod_base = OTHER; note = 2'-O-methyl modified nucleotide
  modified_base 9: mod_base = OTHER; note = 2'-fluoro modified nucleotide
  modified_base 10: mod_base = OTHER; note = 2'-fluoro modified nucleotide
  modified_base 11: mod_base = OTHER; note = 2'-fluoro modified nucleotide
  modified_base 12: mod_base = OTHER; note = 2'-O-methyl modified nucleotide
  modified_base 13: mod_base = OTHER; note = 2'-O-methyl modified nucleotide
  modified_base 14: mod_base = OTHER; note = 2'-O-methyl modified nucleotide
  modified_base 15: mod_base = OTHER; note = 2'-O-methyl modified nucleotide
  modified_base 16: mod_base = OTHER; note = 2'-fluoro modified nucleotide
  modified_base 17: mod_base = OTHER; note = 2'-O-methyl modified nucleotide
  modified_base 18: mod_base = OTHER; note = 2'-O-methyl modified nucleotide
  modified_base 19: mod_base = OTHER; note = 2'-O-methyl modified nucleotide
  modified_base 20: mod_base = OTHER; note = 2'-O-methyl modified nucleotide
  modified_base 21: mod_base = OTHER; note = 2'-O-methyl modified nucleotide
cctggttctcattccttgcaa

SEQ ID NO: 238 - RNA, 21 nt, synthetic construct
  source 1..21: mol_type = other RNA
  modified_base 1: mod_base = OTHER; note = 2'-O-methyl modified nucleotide with phosphorothioate linkage
  modified_base 2: mod_base = OTHER; note = 2'-O-methyl modified nucleotide with phosphorothioate linkage
  modified_base 3: mod_base = OTHER; note = 2'-O-methyl modified nucleotide
  modified_base 4: mod_base = OTHER; note = 2'-O-methyl modified nucleotide
  modified_base 5: mod_base = OTHER; note = 2'-fluoro modified nucleotide
  modified_base 6: mod_base = OTHER; note = 2'-O-methyl modified nucleotide
  modified_base 7: mod_base = OTHER; note = 2'-fluoro modified nucleotide
  modified_base 8: mod_base = OTHER; note = 2'-O-methyl modified nucleotide
  modified_base 9: mod_base = OTHER; note = 2'-fluoro modified nucleotide
  modified_base 10: mod_base = OTHER; note = 2'-fluoro modified nucleotide
  modified_base 11: mod_base = OTHER; note = 2'-fluoro modified nucleotide
  modified_base 12: mod_base = OTHER; note = 2'-O-methyl modified nucleotide
  modified_base 13: mod_base = OTHER; note = 2'-O-methyl modified nucleotide
  modified_base 14: mod_base = OTHER; note = 2'-O-methyl modified nucleotide
  modified_base 15: mod_base = OTHER; note = 2'-O-methyl modified nucleotide
  modified_base 16: mod_base = OTHER; note = 2'-fluoro modified nucleotide
  modified_base 17: mod_base = OTHER; note = 2'-O-methyl modified nucleotide
  modified_base 18: mod_base = OTHER; note = 2'-O-methyl modified nucleotide
  modified_base 19: mod_base = OTHER; note = 2'-O-methyl modified nucleotide
  modified_base 20: mod_base = OTHER; note = 2'-O-methyl modified nucleotide
  modified_base 21: mod_base = OTHER; note = 2'-O-methyl modified nucleotide
ttctcattccttgcaccataa

SEQ ID NO: 239 - RNA, 21 nt, synthetic construct
  source 1..21: mol_type = other RNA
  modified_base 1: mod_base = OTHER; note = 2'-O-methyl modified nucleotide with phosphorothioate linkage
  modified_base 2: mod_base = OTHER; note = 2'-O-methyl modified nucleotide with phosphorothioate linkage
  modified_base 3: mod_base = OTHER; note = 2'-O-methyl modified nucleotide
  modified_base 4: mod_base = OTHER; note = 2'-O-methyl modified nucleotide
  modified_base 5: mod_base = OTHER; note = 2'-fluoro modified nucleotide
  modified_base 6: mod_base = OTHER; note = 2'-O-methyl modified nucleotide
  modified_base 7: mod_base = OTHER; note = 2'-fluoro modified nucleotide
  modified_base 8: mod_base = OTHER; note = 2'-O-methyl modified nucleotide
  modified_base 9: mod_base = OTHER; note = 2'-fluoro modified nucleotide
  modified_base 10: mod_base = OTHER; note = 2'-fluoro modified nucleotide
  modified_base 11: mod_base = OTHER; note = 2'-fluoro modified nucleotide
  modified_base 12: mod_base = OTHER; note = 2'-O-methyl modified nucleotide
  modified_base 13: mod_base = OTHER; note = 2'-O-methyl modified nucleotide
  modified_base 14: mod_base = OTHER; note = 2'-O-methyl modified nucleotide
  modified_base 15: mod_base = OTHER; note = 2'-O-methyl modified nucleotide
  modified_base 16: mod_base = OTHER; note = 2'-fluoro modified nucleotide
  modified_base 17: mod_base = OTHER; note = 2'-O-methyl modified nucleotide
  modified_base 18: mod_base = OTHER; note = 2'-O-methyl modified nucleotide
  modified_base 19: mod_base = OTHER; note = 2'-O-methyl modified nucleotide
  modified_base 20: mod_base = OTHER; note = 2'-O-methyl modified nucleotide
  modified_base 21: mod_base = OTHER; note = 2'-O-methyl modified nucleotide
tattggctttctgctgggtta

SEQ ID NO: 240 - RNA, 21 nt, synthetic construct
  source 1..21: mol_type = other RNA
  modified_base 1: mod_base = OTHER; note = 2'-O-methyl modified nucleotide with phosphorothioate linkage
  modified_base 2: mod_base = OTHER; note = 2'-O-methyl modified nucleotide with phosphorothioate linkage
  modified_base 3: mod_base = OTHER; note = 2'-O-methyl modified nucleotide
  modified_base 4: mod_base = OTHER; note = 2'-O-methyl modified nucleotide
  modified_base 5: mod_base = OTHER; note = 2'-fluoro modified nucleotide
  modified_base 6: mod_base = OTHER; note = 2'-O-methyl modified nucleotide
  modified_base 7: mod_base = OTHER; note = 2'-fluoro modified nucleotide
  modified_base 8: mod_base = OTHER; note = 2'-O-methyl modified nucleotide
  modified_base 9: mod_base = OTHER; note = 2'-fluoro modified nucleotide
  modified_base 10: mod_base = OTHER; note = 2'-fluoro modified nucleotide
  modified_base 11: mod_base = OTHER; note = 2'-fluoro modified nucleotide
  modified_base 12: mod_base = OTHER; note = 2'-O-methyl modified nucleotide
  modified_base 13: mod_base = OTHER; note = 2'-O-methyl modified nucleotide
  modified_base 14: mod_base = OTHER; note = 2'-O-methyl modified nucleotide
  modified_base 15: mod_base = OTHER; note = 2'-O-methyl modified nucleotide
  modified_base 16: mod_base = OTHER; note = 2'-fluoro modified nucleotide
  modified_base 17: mod_base = OTHER; note = 2'-O-methyl modified nucleotide
  modified_base 18: mod_base = OTHER; note = 2'-O-methyl modified nucleotide
  modified_base 19: mod_base = OTHER; note = 2'-O-methyl modified nucleotide
  modified_base 20: mod_base = OTHER; note = 2'-O-methyl modified nucleotide
  modified_base 21: mod_base = OTHER; note = 2'-O-methyl modified nucleotide
cctcctctacatgattttcca

SEQ ID NO: 241 - RNA, 21 nt, synthetic construct
  source 1..21: mol_type = other RNA
  modified_base 1: mod_base = OTHER; note = 2'-O-methyl modified nucleotide with phosphorothioate linkage
  modified_base 2: mod_base = OTHER; note = 2'-O-methyl modified nucleotide with phosphorothioate linkage
  modified_base 3: mod_base = OTHER; note = 2'-O-methyl modified nucleotide
  modified_base 4: mod_base = OTHER; note = 2'-O-methyl modified nucleotide
  modified_base 5: mod_base = OTHER; note = 2'-O-methyl modified nucleotide
  modified_base 6: mod_base = OTHER; note = 2'-O-methyl modified nucleotide
  modified_base 7: mod_base = OTHER; note = 2'-fluoro modified nucleotide
  modified_base 8: mod_base = OTHER; note = 2'-O-methyl modified nucleotide
  modified_base 9: mod_base = OTHER; note = 2'-fluoro modified nucleotide
  modified_base 10: mod_base = OTHER; note = 2'-fluoro modified nucleotide
  modified_base 11: mod_base = OTHER; note = 2'-fluoro modified nucleotide
  modified_base 12: mod_base = OTHER; note = 2'-O-methyl modified nucleotide
  modified_base 13: mod_base = OTHER; note = 2'-O-methyl modified nucleotide
  modified_base 14: mod_base = OTHER; note = 2'-O-methyl modified nucleotide
  modified_base 15: mod_base = OTHER; note = 2'-O-methyl modified nucleotide
  modified_base 16: mod_base = OTHER; note = 2'-fluoro modified nucleotide
  modified_base 17: mod_base = OTHER; note = 2'-fluoro modified nucleotide
  modified_base 18: mod_base = OTHER; note = 2'-O-methyl modified nucleotide
  modified_base 19: mod_base = OTHER; note = 2'-O-methyl modified nucleotide
  modified_base 20: mod_base = OTHER; note = 2'-O-methyl modified nucleotide
  modified_base 21: mod_base = OTHER; note = 2'-O-methyl modified nucleotide
caagatcaaggctcacttata

SEQ ID NO: 242 - RNA, 21 nt, synthetic construct
  source 1..21: mol_type = other RNA
  modified_base 1: mod_base = OTHER; note = 2'-O-methyl modified nucleotide with phosphorothioate linkage
  modified_base 2: mod_base = OTHER; note = 2'-O-methyl modified nucleotide with phosphorothioate linkage
  modified_base 3: mod_base = OTHER; note = 2'-O-methyl modified nucleotide
  modified_base 4: mod_base = OTHER; note = 2'-O-methyl modified nucleotide
  modified_base 5: mod_base = OTHER; note = 2'-O-methyl modified nucleotide
  modified_base 6: mod_base = OTHER; note = 2'-O-methyl modified nucleotide
  modified_base 7: mod_base = OTHER; note = 2'-fluoro modified nucleotide
  modified_base 8: mod_base = OTHER; note = 2'-O-methyl modified nucleotide
  modified_base 9: mod_base = OTHER; note = 2'-fluoro modified nucleotide
  modified_base 10: mod_base = OTHER; note = 2'-fluoro modified nucleotide
  modified_base 11: mod_base = OTHER; note = 2'-fluoro modified nucleotide
  modified_base 12: mod_base = OTHER; note = 2'-O-methyl modified nucleotide
  modified_base 13: mod_base = OTHER; note = 2'-O-methyl modified nucleotide
  modified_base 14: mod_base = OTHER; note = 2'-O-methyl modified nucleotide
  modified_base 15: mod_base = OTHER; note = 2'-O-methyl modified nucleotide
  modified_base 16: mod_base = OTHER; note = 2'-fluoro modified nucleotide
  modified_base 17: mod_base = OTHER; note = 2'-fluoro modified nucleotide
  modified_base 18: mod_base = OTHER; note = 2'-O-methyl modified nucleotide
  modified_base 19: mod_base = OTHER; note = 2'-O-methyl modified nucleotide
  modified_base 20: mod_base = OTHER; note = 2'-O-methyl modified nucleotide
  modified_base 21: mod_base = OTHER; note = 2'-O-methyl modified nucleotide
cctcagcattgtgatgaccaa

SEQ ID NO: 243 - RNA, 21 nt, synthetic construct
  source 1..21: mol_type = other RNA
  modified_base 1: mod_base = OTHER; note = 2'-O-methyl modified nucleotide with phosphorothioate linkage
  modified_base 2: mod_base = OTHER; note = 2'-O-methyl modified nucleotide with phosphorothioate linkage
  modified_base 3: mod_base = OTHER; note = 2'-O-methyl modified nucleotide
  modified_base 4: mod_base = OTHER; note = 2'-O-methyl modified nucleotide
  modified_base 5: mod_base = OTHER; note = 2'-O-methyl modified nucleotide
  modified_base 6: mod_base = OTHER; note = 2'-O-methyl modified nucleotide
  modified_base 7: mod_base = OTHER; note = 2'-fluoro modified nucleotide
  modified_base 8: mod_base = OTHER; note = 2'-O-methyl modified nucleotide
  modified_base 9: mod_base = OTHER; note = 2'-fluoro modified nucleotide
  modified_base 10: mod_base = OTHER; note = 2'-fluoro modified nucleotide
  modified_base 11: mod_base = OTHER; note = 2'-fluoro modified nucleotide
  modified_base 12: mod_base = OTHER; note = 2'-O-methyl modified nucleotide
  modified_base 13: mod_base = OTHER; note = 2'-O-methyl modified nucleotide
  modified_base 14: mod_base = OTHER; note = 2'-O-methyl modified nucleotide
  modified_base 15: mod_base = OTHER; note = 2'-O-methyl modified nucleotide
  modified_base 16: mod_base = OTHER; note = 2'-fluoro modified nucleotide
  modified_base 17: mod_base = OTHER; note = 2'-fluoro modified nucleotide
  modified_base 18: mod_base = OTHER; note = 2'-O-methyl modified nucleotide
  modified_base 19: mod_base = OTHER; note = 2'-O-methyl modified nucleotide
  modified_base 20: mod_base = OTHER; note = 2'-O-methyl modified nucleotide
  modified_base 21: mod_base = OTHER; note = 2'-O-methyl modified nucleotide
gatcatcattctcttgtgcaa

SEQ ID NO: 244 - RNA, 21 nt, synthetic construct
  source 1..21: mol_type = other RNA
  modified_base 1: mod_base = OTHER; note = 2'-O-methyl modified nucleotide with phosphorothioate linkage
  modified_base 2: mod_base = OTHER; note = 2'-O-methyl modified nucleotide with phosphorothioate linkage
  modified_base 3: mod_base = OTHER; note = 2'-O-methyl modified nucleotide
  modified_base 4: mod_base = OTHER; note = 2'-O-methyl modified nucleotide
  modified_base 5: mod_base = OTHER; note = 2'-O-methyl modified nucleotide
  modified_base 6: mod_base = OTHER; note = 2'-O-methyl modified nucleotide
  modified_base 7: mod_base = OTHER; note = 2'-fluoro modified nucleotide
  modified_base 8: mod_base = OTHER; note = 2'-O-methyl modified nucleotide
  modified_base 9: mod_base = OTHER; note = 2'-fluoro modified nucleotide
  modified_base 10: mod_base = OTHER; note = 2'-fluoro modified nucleotide
  modified_base 11: mod_base = OTHER; note = 2'-fluoro modified nucleotide
  modified_base 12: mod_base = OTHER; note = 2'-O-methyl modified nucleotide
  modified_base 13: mod_base = OTHER; note = 2'-O-methyl modified nucleotide
  modified_base 14: mod_base = OTHER; note = 2'-O-methyl modified nucleotide
  modified_base 15: mod_base = OTHER; note = 2'-O-methyl modified nucleotide
  modified_base 16: mod_base = OTHER; note = 2'-fluoro modified nucleotide
  modified_base 17: mod_base = OTHER; note = 2'-fluoro modified nucleotide
  modified_base 18: mod_base = OTHER; note = 2'-O-methyl modified nucleotide
  modified_base 19: mod_base = OTHER; note = 2'-O-methyl modified nucleotide
  modified_base 20: mod_base = OTHER; note = 2'-O-methyl modified nucleotide
  modified_base 21: mod_base = OTHER; note = 2'-O-methyl modified nucleotide
tgtggccgtcacagttctcta

SEQ ID NO: 245 - RNA, 21 nt, synthetic construct
  source 1..21: mol_type = other RNA
  modified_base 1: mod_base = OTHER; note = 2'-O-methyl modified nucleotide with phosphorothioate linkage
  modified_base 2: mod_base = OTHER; note = 2'-O-methyl modified nucleotide with phosphorothioate linkage
  modified_base 3: mod_base = OTHER; note = 2'-O-methyl modified nucleotide
  modified_base 4: mod_base = OTHER; note = 2'-O-methyl modified nucleotide
  modified_base 5: mod_base = OTHER; note = 2'-O-methyl modified nucleotide
  modified_base 6: mod_base = OTHER; note = 2'-O-methyl modified nucleotide
  modified_base 7: mod_base = OTHER; note = 2'-fluoro modified nucleotide
  modified_base 8: mod_base = OTHER; note = 2'-O-methyl modified nucleotide
  modified_base 9: mod_base = OTHER; note = 2'-fluoro modified nucleotide
  modified_base 10: mod_base = OTHER; note = 2'-fluoro modified nucleotide
  modified_base 11: mod_base = OTHER; note = 2'-fluoro modified nucleotide
  modified_base 12: mod_base = OTHER; note = 2'-O-methyl modified nucleotide
  modified_base 13: mod_base = OTHER; note = 2'-O-methyl modified nucleotide
  modified_base 14: mod_base = OTHER; note = 2'-O-methyl modified nucleotide
  modified_base 15: mod_base = OTHER; note = 2'-O-methyl modified nucleotide
  modified_base 16: mod_base = OTHER; note = 2'-fluoro modified nucleotide
  modified_base 17: mod_base = OTHER; note = 2'-fluoro modified nucleotide
  modified_base 18: mod_base = OTHER; note = 2'-O-methyl modified nucleotide
  modified_base 19: mod_base = OTHER; note = 2'-O-methyl modified nucleotide
  modified_base 20: mod_base = OTHER; note = 2'-O-methyl modified nucleotide
  modified_base 21: mod_base = OTHER; note = 2'-O-methyl modified nucleotide
tctggtcccaaagcaattcta

SEQ ID NO: 246 - RNA, 21 nt, synthetic construct
  source 1..21: mol_type = other RNA
  modified_base 1: mod_base = OTHER; note = 2'-O-methyl modified nucleotide with phosphorothioate linkage
  modified_base 2: mod_base = OTHER; note = 2'-O-methyl modified nucleotide with phosphorothioate linkage
  modified_base 3: mod_base = OTHER; note = 2'-O-methyl modified nucleotide
  modified_base 4: mod_base = OTHER; note = 2'-O-methyl modified nucleotide
  modified_base 5: mod_base = OTHER; note = 2'-O-methyl modified nucleotide
  modified_base 6: mod_base = OTHER; note = 2'-O-methyl modified nucleotide
  modified_base 7: mod_base = OTHER; note = 2'-fluoro modified nucleotide
  modified_base 8: mod_base = OTHER; note = 2'-O-methyl modified nucleotide
  modified_base 9: mod_base = OTHER; note = 2'-fluoro modified nucleotide
  modified_base 10: mod_base = OTHER; note = 2'-fluoro modified nucleotide
  modified_base 11: mod_base = OTHER; note = 2'-fluoro modified nucleotide
  modified_base 12: mod_base = OTHER; note = 2'-O-methyl modified nucleotide
  modified_base 13: mod_base = OTHER; note = 2'-O-methyl modified nucleotide
  modified_base 14: mod_base = OTHER; note = 2'-O-methyl modified nucleotide
  modified_base 15: mod_base = OTHER; note = 2'-O-methyl modified nucleotide
  modified_base 16: mod_base = OTHER; note = 2'-fluoro modified nucleotide
  modified_base 17: mod_base = OTHER; note = 2'-fluoro modified nucleotide
  modified_base 18: mod_base = OTHER; note = 2'-O-methyl modified nucleotide
  modified_base 19: mod_base = OTHER; note = 2'-O-methyl modified nucleotide
  modified_base 20: mod_base = OTHER; note = 2'-O-methyl modified nucleotide
  modified_base 21: mod_base = OTHER; note = 2'-O-methyl modified nucleotide
tttccagtacatctatcagaa

SEQ ID NO: 247 - RNA, 21 nt, synthetic construct
  source 1..21: mol_type = other RNA
  modified_base 1: mod_base = OTHER; note = 2'-O-methyl modified nucleotide with phosphorothioate linkage
  modified_base 2: mod_base = OTHER; note = 2'-O-methyl modified nucleotide with phosphorothioate linkage
  modified_base 3: mod_base = OTHER; note = 2'-O-methyl modified nucleotide
  modified_base 4: mod_base = OTHER; note = 2'-O-methyl modified nucleotide
  modified_base 5: mod_base = OTHER; note = 2'-O-methyl modified nucleotide
  modified_base 6: mod_base = OTHER; note = 2'-O-methyl modified nucleotide
  modified_base 7: mod_base = OTHER; note = 2'-fluoro modified nucleotide
  modified_base 8: mod_base = OTHER; note = 2'-O-methyl modified nucleotide
  modified_base 9: mod_base = OTHER; note = 2'-fluoro modified nucleotide
  modified_base 10: mod_base = OTHER; note = 2'-fluoro modified nucleotide
  modified_base 11: mod_base = OTHER; note = 2'-fluoro modified nucleotide
  modified_base 12: mod_base = OTHER; note = 2'-O-methyl modified nucleotide
  modified_base 13: mod_base = OTHER; note = 2'-O-methyl modified nucleotide
  modified_base 14: mod_base = OTHER; note = 2'-O-methyl modified nucleotide
  modified_base 15: mod_base = OTHER; note = 2'-O-methyl modified nucleotide
  modified_base 16: mod_base = OTHER; note = 2'-fluoro modified nucleotide
  modified_base 17: mod_base = OTHER; note = 2'-fluoro modified nucleotide
  modified_base 18: mod_base = OTHER; note = 2'-O-methyl modified nucleotide
  modified_base 19: mod_base = OTHER; note = 2'-O-methyl modified nucleotide
  modified_base 20: mod_base = OTHER; note = 2'-O-methyl modified nucleotide
  modified_base 21: mod_base = OTHER; note = 2'-O-methyl modified nucleotide
ttccagtacatctatcagaaa

SEQ ID NO: 248 - RNA, 21 nt, synthetic construct
  source 1..21: mol_type = other RNA
  modified_base 1: mod_base = OTHER; note = 2'-O-methyl modified nucleotide with phosphorothioate linkage
  modified_base 2: mod_base = OTHER; note = 2'-O-methyl modified nucleotide with phosphorothioate linkage
  modified_base 3: mod_base = OTHER; note = 2'-O-methyl modified nucleotide
  modified_base 4: mod_base = OTHER; note = 2'-O-methyl modified nucleotide
  modified_base 5: mod_base = OTHER; note = 2'-O-methyl modified nucleotide
  modified_base 6: mod_base = OTHER; note = 2'-O-methyl modified nucleotide
  modified_base 7: mod_base = OTHER; note = 2'-fluoro modified nucleotide
  modified_base 8: mod_base = OTHER; note = 2'-O-methyl modified nucleotide
  modified_base 9: mod_base = OTHER; note = 2'-fluoro modified nucleotide
  modified_base 10: mod_base = OTHER; note = 2'-fluoro modified nucleotide
  modified_base 11: mod_base = OTHER; note = 2'-fluoro modified nucleotide
  modified_base 12: mod_base = OTHER; note = 2'-O-methyl modified nucleotide
  modified_base 13: mod_base = OTHER; note = 2'-O-methyl modified nucleotide
  modified_base 14: mod_base = OTHER; note = 2'-O-methyl modified nucleotide
  modified_base 15: mod_base = OTHER; note = 2'-O-methyl modified nucleotide
  modified_base 16: mod_base = OTHER; note = 2'-fluoro modified nucleotide
  modified_base 17: mod_base = OTHER; note = 2'-fluoro modified nucleotide
  modified_base 18: mod_base = OTHER; note = 2'-O-methyl modified nucleotide
  modified_base 19: mod_base = OTHER; note = 2'-O-methyl modified nucleotide
  modified_base 20: mod_base = OTHER; note = 2'-O-methyl modified nucleotide
  modified_base 21: mod_base = OTHER; note = 2'-O-methyl modified nucleotide
acatctatcagaatcatcaaa

SEQ ID NO: 249 - RNA, 21 nt, synthetic construct
  source 1..21: mol_type = other RNA
  modified_base 1: mod_base = OTHER; note = 2'-O-methyl modified nucleotide with phosphorothioate linkage
  modified_base 2: mod_base = OTHER; note = 2'-O-methyl modified nucleotide with phosphorothioate linkage
  modified_base 3: mod_base = OTHER; note = 2'-O-methyl modified nucleotide
  modified_base 4: mod_base = OTHER; note = 2'-O-methyl modified nucleotide
  modified_base 5: mod_base = OTHER; note = 2'-O-methyl modified nucleotide
  modified_base 6: mod_base = OTHER; note = 2'-O-methyl modified nucleotide
  modified_base 7: mod_base = OTHER; note = 2'-fluoro modified nucleotide
  modified_base 8: mod_base = OTHER; note = 2'-O-methyl modified nucleotide
  modified_base 9: mod_base = OTHER; note = 2'-fluoro modified nucleotide
  modified_base 10: mod_base = OTHER; note = 2'-fluoro modified nucleotide
  modified_base 11: mod_base = OTHER; note = 2'-fluoro modified nucleotide
  modified_base 12: mod_base = OTHER; note = 2'-O-methyl modified nucleotide
  modified_base 13: mod_base = OTHER; note = 2'-O-methyl modified nucleotide
  modified_base 14: mod_base = OTHER; note = 2'-O-methyl modified nucleotide
  modified_base 15: mod_base = OTHER; note = 2'-O-methyl modified nucleotide
  modified_base 16: mod_base = OTHER; note = 2'-fluoro modified nucleotide
  modified_base 17: mod_base = OTHER; note = 2'-fluoro modified nucleotide
  modified_base 18: mod_base = OTHER; note = 2'-O-methyl modified nucleotide
  modified_base 19: mod_base = OTHER; note = 2'-O-methyl modified nucleotide
  modified_base 20: mod_base = OTHER; note = 2'-O-methyl modified nucleotide
  modified_base 21: mod_base = OTHER; note = 2'-O-methyl modified nucleotide
taaagtcactcaattcctgaa

SEQ ID NO: 250 - RNA, 21 nt, synthetic construct
  source 1..21: mol_type = other RNA
  modified_base 1: mod_base = OTHER; note = 2'-O-methyl modified nucleotide with phosphorothioate linkage
  modified_base 2: mod_base = OTHER; note = 2'-O-methyl modified nucleotide with phosphorothioate linkage
  modified_base 3: mod_base = OTHER; note = 2'-O-methyl modified nucleotide
  modified_base 4: mod_base = OTHER; note = 2'-O-methyl modified nucleotide
  modified_base 5: mod_base = OTHER; note = 2'-O-methyl modified nucleotide
  modified_base 6: mod_base = OTHER; note = 2'-O-methyl modified nucleotide
  modified_base 7: mod_base = OTHER; note = 2'-fluoro modified nucleotide
  modified_base 8: mod_base = OTHER; note = 2'-O-methyl modified nucleotide
  modified_base 9: mod_base = OTHER; note = 2'-fluoro modified nucleotide
  modified_base 10: mod_base = OTHER; note = 2'-fluoro modified nucleotide
  modified_base 11: mod_base = OTHER; note = 2'-fluoro modified nucleotide
  modified_base 12: mod_base = OTHER; note = 2'-O-methyl modified nucleotide
  modified_base 13: mod_base = OTHER; note = 2'-O-methyl modified nucleotide
  modified_base 14: mod_base = OTHER; note = 2'-O-methyl modified nucleotide
  modified_base 15: mod_base = OTHER; note = 2'-O-methyl modified nucleotide
  modified_base 16: mod_base = OTHER; note = 2'-fluoro modified nucleotide
  modified_base 17: mod_base = OTHER; note = 2'-fluoro modified nucleotide
  modified_base 18: mod_base = OTHER; note = 2'-O-methyl modified nucleotide
  modified_base 19: mod_base = OTHER; note = 2'-O-methyl modified nucleotide
  modified_base 20: mod_base = OTHER; note = 2'-O-methyl modified nucleotide
  modified_base 21: mod_base = OTHER; note = 2'-O-methyl modified nucleotide
ttcctgaactaatcaatataa

SEQ ID NO: 251 - RNA, 21 nt, synthetic construct
  source 1..21: mol_type = other RNA
  modified_base 1: mod_base = OTHER; note = 2'-O-methyl modified nucleotide with phosphorothioate linkage
  modified_base 2: mod_base = OTHER; note = 2'-O-methyl modified nucleotide with phosphorothioate linkage
  modified_base 3: mod_base = OTHER; note = 2'-O-methyl modified nucleotide
  modified_base 4: mod_base = OTHER; note = 2'-O-methyl modified nucleotide
  modified_base 5: mod_base = OTHER; note = 2'-O-methyl modified nucleotide
  modified_base 6: mod_base = OTHER; note = 2'-O-methyl modified nucleotide
  modified_base 7: mod_base = OTHER; note = 2'-fluoro modified nucleotide
  modified_base 8: mod_base = OTHER; note = 2'-O-methyl modified nucleotide
  modified_base 9: mod_base = OTHER; note = 2'-fluoro modified nucleotide
  modified_base 10: mod_base = OTHER; note = 2'-fluoro modified nucleotide
  modified_base 11: mod_base = OTHER; note = 2'-fluoro modified nucleotide
  modified_base 12: mod_base = OTHER; note = 2'-O-methyl modified nucleotide
  modified_base 13: mod_base = OTHER; note = 2'-O-methyl modified nucleotide
  modified_base 14: mod_base = OTHER; note = 2'-O-methyl modified nucleotide
  modified_base 15: mod_base = OTHER; note = 2'-O-methyl modified nucleotide
  modified_base 16: mod_base = OTHER; note = 2'-fluoro modified nucleotide
  modified_base 17: mod_base = OTHER; note = 2'-fluoro modified nucleotide
  modified_base 18: mod_base = OTHER; note = 2'-O-methyl modified nucleotide
  modified_base 19: mod_base = OTHER; note = 2'-O-methyl modified nucleotide
  modified_base 20: mod_base = OTHER; note = 2'-O-methyl modified nucleotide
  modified_base 21: mod_base = OTHER; note = 2'-O-methyl modified nucleotide
cctgaactaatcaatatataa

SEQ ID NO: 252 - RNA, 21 nt, synthetic construct
  source 1..21: mol_type = other RNA
  modified_base 1: mod_base = OTHER; note = 2'-O-methyl modified nucleotide with phosphorothioate linkage
  modified_base 2: mod_base = OTHER; note = 2'-O-methyl modified nucleotide with phosphorothioate linkage
  modified_base 3: mod_base = OTHER; note = 2'-O-methyl modified nucleotide
  modified_base 4: mod_base = OTHER; note = 2'-O-methyl modified nucleotide
  modified_base 5: mod_base = OTHER; note = 2'-O-methyl modified nucleotide
  modified_base 6: mod_base = OTHER; note = 2'-O-methyl modified nucleotide
  modified_base 7: mod_base = OTHER; note = 2'-fluoro modified nucleotide
  modified_base 8: mod_base = OTHER; note = 2'-O-methyl modified nucleotide
  modified_base 9: mod_base = OTHER; note = 2'-fluoro modified nucleotide
  modified_base 10: mod_base = OTHER; note = 2'-fluoro modified nucleotide
  modified_base 11: mod_base = OTHER; note = 2'-fluoro modified nucleotide
  modified_base 12: mod_base = OTHER; note = 2'-O-methyl modified nucleotide
  modified_base 13: mod_base = OTHER; note = 2'-O-methyl modified nucleotide
  modified_base 14: mod_base = OTHER; note = 2'-O-methyl modified nucleotide
  modified_base 15: mod_base = OTHER; note = 2'-O-methyl modified nucleotide
  modified_base 16: mod_base = OTHER; note = 2'-fluoro modified nucleotide
  modified_base 17: mod_base = OTHER; note = 2'-fluoro modified nucleotide
  modified_base 18: mod_base = OTHER; note = 2'-O-methyl modified nucleotide
  modified_base 19: mod_base = OTHER; note = 2'-O-methyl modified nucleotide
  modified_base 20: mod_base = OTHER; note = 2'-O-methyl modified nucleotide
  modified_base 21: mod_base = OTHER; note = 2'-O-methyl modified nucleotide
cctggttctcattccttgcaa

SEQ ID NO: 253 - RNA, 21 nt, synthetic construct
  source 1..21: mol_type = other RNA
  modified_base 1: mod_base = OTHER; note = 2'-O-methyl modified nucleotide with phosphorothioate linkage
  modified_base 2: mod_base = OTHER; note = 2'-O-methyl modified nucleotide with phosphorothioate linkage
  modified_base 3: mod_base = OTHER; note = 2'-O-methyl modified nucleotide
  modified_base 4: mod_base = OTHER; note = 2'-O-methyl modified nucleotide
  modified_base 5: mod_base = OTHER; note = 2'-O-methyl modified nucleotide
  modified_base 6: mod_base = OTHER; note = 2'-O-methyl modified nucleotide
  modified_base 7: mod_base = OTHER; note = 2'-fluoro modified nucleotide
  modified_base 8: mod_base = OTHER; note = 2'-O-methyl modified nucleotide
  modified_base 9: mod_base = OTHER; note = 2'-fluoro modified nucleotide
  modified_base 10: mod_base = OTHER; note = 2'-fluoro modified nucleotide
  modified_base 11: mod_base = OTHER; note = 2'-fluoro modified nucleotide
  modified_base 12: mod_base = OTHER; note = 2'-O-methyl modified nucleotide
  modified_base 13: mod_base = OTHER; note = 2'-O-methyl modified nucleotide
  modified_base 14: mod_base = OTHER; note = 2'-O-methyl modified nucleotide
  modified_base 15: mod_base = OTHER; note = 2'-O-methyl modified nucleotide
  modified_base 16: mod_base = OTHER; note = 2'-fluoro modified nucleotide
  modified_base 17: mod_base = OTHER; note = 2'-fluoro modified nucleotide
  modified_base 18: mod_base = OTHER; note = 2'-O-methyl modified nucleotide
  modified_base 19: mod_base = OTHER; note = 2'-O-methyl modified nucleotide
  modified_base 20: mod_base = OTHER; note = 2'-O-methyl modified nucleotide
  modified_base 21: mod_base = OTHER; note = 2'-O-methyl modified nucleotide
ttctcattccttgcaccataa

SEQ ID NO: 254 - RNA, 21 nt, synthetic construct
  source 1..21: mol_type = other RNA
  modified_base 1: mod_base = OTHER; note = 2'-O-methyl modified nucleotide with phosphorothioate linkage
  modified_base 2: mod_base = OTHER; note = 2'-O-methyl modified nucleotide with phosphorothioate linkage
  modified_base 3: mod_base = OTHER; note = 2'-O-methyl modified nucleotide
  modified_base 4: mod_base = OTHER; note = 2'-O-methyl modified nucleotide
  modified_base 5: mod_base = OTHER; note = 2'-O-methyl modified nucleotide
  modified_base 6: mod_base = OTHER; note = 2'-O-methyl modified nucleotide
  modified_base 7: mod_base = OTHER; note = 2'-fluoro modified nucleotide
  modified_base 8: mod_base = OTHER; note = 2'-O-methyl modified nucleotide
  modified_base 9: mod_base = OTHER; note = 2'-fluoro modified nucleotide
  modified_base 10: mod_base = OTHER; note = 2'-fluoro modified nucleotide
  modified_base 11: mod_base = OTHER; note = 2'-fluoro modified nucleotide
  modified_base 12: mod_base = OTHER; note = 2'-O-methyl modified nucleotide
  modified_base 13: mod_base = OTHER; note = 2'-O-methyl modified nucleotide
  modified_base 14: mod_base = OTHER; note = 2'-O-methyl modified nucleotide
  modified_base 15: mod_base = OTHER; note = 2'-O-methyl modified nucleotide
  modified_base 16: mod_base = OTHER; note = 2'-fluoro modified nucleotide
  modified_base 17: mod_base = OTHER; note = 2'-fluoro modified nucleotide
  modified_base 18: mod_base = OTHER; note = 2'-O-methyl modified nucleotide
  modified_base 19: mod_base = OTHER; note = 2'-O-methyl modified nucleotide
  modified_base 20: mod_base = OTHER; note = 2'-O-methyl modified nucleotide
  modified_base 21: mod_base = OTHER; note = 2'-O-methyl modified nucleotide
tattggctttctgctgggtta

SEQ ID NO: 255 - RNA, 21 nt, synthetic construct
  source 1..21: mol_type = other RNA
  modified_base 1: mod_base = OTHER; note = 2'-O-methyl modified nucleotide with phosphorothioate linkage
  modified_base 2: mod_base = OTHER; note = 2'-O-methyl modified nucleotide with phosphorothioate linkage
  modified_base 3: mod_base = OTHER; note = 2'-O-methyl modified nucleotide
  modified_base 4: mod_base = OTHER; note = 2'-O-methyl modified nucleotide
  modified_base 5: mod_base = OTHER; note = 2'-O-methyl modified nucleotide
  modified_base 6: mod_base = OTHER; note = 2'-O-methyl modified nucleotide
  modified_base 7: mod_base = OTHER; note = 2'-fluoro modified nucleotide
  modified_base 8: mod_base = OTHER; note = 2'-O-methyl modified nucleotide
  modified_base 9: mod_base = OTHER; note = 2'-fluoro modified nucleotide
  modified_base 10: mod_base = OTHER; note = 2'-fluoro modified nucleotide
  modified_base 11: mod_base = OTHER; note = 2'-fluoro modified nucleotide
  modified_base 12: mod_base = OTHER; note = 2'-O-methyl modified nucleotide
  modified_base 13: mod_base = OTHER; note = 2'-O-methyl modified nucleotide
  modified_base 14: mod_base = OTHER; note = 2'-O-methyl modified nucleotide
  modified_base 15: mod_base = OTHER; note = 2'-O-methyl modified nucleotide
  modified_base 16: mod_base = OTHER; note = 2'-fluoro modified nucleotide
  modified_base 17: mod_base = OTHER; note = 2'-fluoro modified nucleotide
  modified_base 18: mod_base = OTHER; note = 2'-O-methyl modified nucleotide
  modified_base 19: mod_base = OTHER; note = 2'-O-methyl modified nucleotide
  modified_base 20: mod_base = OTHER; note = 2'-O-methyl modified nucleotide
  modified_base 21: mod_base = OTHER; note = 2'-O-methyl modified nucleotide
cctcctctacatgattttcca

SEQ ID NO: 256 - RNA, 21 nt, synthetic construct
  source 1..21: mol_type = other RNA
  modified_base 1: mod_base = OTHER; note = 2'-O-methyl modified nucleotide with phosphorothioate linkage
  modified_base 2: mod_base = OTHER; note = 2'-O-methyl modified nucleotide with phosphorothioate linkage
  modified_base 3: mod_base = OTHER; note = 2'-O-methyl modified nucleotide
  modified_base 4: mod_base = OTHER; note = 2'-O-methyl modified nucleotide
  modified_base 5: mod_base = OTHER; note = 2'-O-methyl modified nucleotide
  modified_base 6: mod_base = OTHER; note = 2'-O-methyl modified nucleotide
  modified_base 7: mod_base = OTHER; note = 2'-fluoro modified nucleotide
  modified_base 8: mod_base = OTHER; note = 2'-O-methyl modified nucleotide
  modified_base 9: mod_base = OTHER; note = 2'-fluoro modified nucleotide
  modified_base 10: mod_base = OTHER; note = 2'-fluoro modified nucleotide
  modified_base 11: mod_base = OTHER; note = 2'-fluoro modified nucleotide
  modified_base 12: mod_base = OTHER; note = 2'-O-methyl modified nucleotide
  modified_base 13: mod_base = OTHER; note = 2'-O-methyl modified nucleotide
  modified_base 14: mod_base = OTHER; note = 2'-O-methyl modified nucleotide
  modified_base 15: mod_base = OTHER; note = 2'-O-methyl modified nucleotide
  modified_base 16: mod_base = OTHER; note = 2'-fluoro modified nucleotide
  modified_base 17: mod_base = OTHER; note = 2'-fluoro modified nucleotide
  modified_base 18: mod_base = OTHER; note = 2'-O-methyl modified nucleotide
  modified_base 19: mod_base = OTHER; note = 2'-O-methyl modified nucleotide
  modified_base 20: mod_base = OTHER; note = 2'-O-methyl modified nucleotide
  modified_base 21: mod_base = OTHER; note = 2'-O-methyl modified nucleotide
caagatcaaggctcacttata

SEQ ID NO: 257 - RNA, 21 nt, synthetic construct
  source 1..21: mol_type = other RNA
  modified_base 1: mod_base = OTHER; note = 2'-O-methyl modified nucleotide with phosphorothioate linkage
  modified_base 2: mod_base = OTHER; note = 2'-O-methyl modified nucleotide with phosphorothioate linkage
  modified_base 3: mod_base = OTHER; note = 2'-O-methyl modified nucleotide
  modified_base 4: mod_base = OTHER; note = 2'-O-methyl modified nucleotide
  modified_base 5: mod_base = OTHER; note = 2'-O-methyl modified nucleotide
  modified_base 6: mod_base = OTHER; note = 2'-O-methyl modified nucleotide
  modified_base 7: mod_base = OTHER; note = 2'-fluoro modified nucleotide
  modified_base 8: mod_base = OTHER; note = 2'-O-methyl modified nucleotide
  modified_base 9: mod_base = OTHER; note = 2'-fluoro modified nucleotide
  modified_base 10: mod_base = OTHER; note = 2'-fluoro modified nucleotide
  modified_base 11: mod_base = OTHER; note = 2'-fluoro modified nucleotide
  modified_base 12: mod_base = OTHER; note = 2'-O-methyl modified nucleotide
  modified_base 13: mod_base = OTHER; note = 2'-O-methyl modified nucleotide
  modified_base 14: mod_base = OTHER; note = 2'-O-methyl modified nucleotide
  modified_base 15: mod_base = OTHER; note = 2'-O-methyl modified nucleotide
  modified_base 16: mod_base = OTHER; note = 2'-fluoro modified nucleotide
  modified_base 17: mod_base = OTHER; note = 2'-fluoro modified nucleotide
  modified_base 18: mod_base = OTHER; note = 2'-O-methyl modified nucleotide
  modified_base 19: mod_base = OTHER; note = 2'-O-methyl modified nucleotide
  modified_base 20: mod_base = OTHER; note = 2'-O-methyl modified nucleotide
  modified_base 21: mod_base = OTHER; note = 2'-O-methyl modified nucleotide
cctcagcattgtgatgaccaa

SEQ ID NO: 258 - RNA, 21 nt, synthetic construct
  source 1..21: mol_type = other RNA
  modified_base 1: mod_base = OTHER; note = 2'-O-methyl modified nucleotide with phosphorothioate linkage
  modified_base 2: mod_base = OTHER; note = 2'-O-methyl modified nucleotide with phosphorothioate linkage
  modified_base 3: mod_base = OTHER; note = 2'-O-methyl modified nucleotide
  modified_base 4: mod_base = OTHER; note = 2'-O-methyl modified nucleotide
  modified_base 5: mod_base = OTHER; note = 2'-O-methyl modified nucleotide
  modified_base 6: mod_base = OTHER; note = 2'-O-methyl modified nucleotide
  modified_base 7: mod_base = OTHER; note = 2'-fluoro modified nucleotide
  modified_base 8: mod_base = OTHER; note = 2'-O-methyl modified nucleotide
  modified_base 9: mod_base = OTHER; note = 2'-fluoro modified nucleotide
  modified_base 10: mod_base = OTHER; note = 2'-fluoro modified nucleotide
  modified_base 11: mod_base = OTHER; note = 2'-fluoro modified nucleotide
  modified_base 12: mod_base = OTHER; note = 2'-O-methyl modified nucleotide
  modified_base 13: mod_base = OTHER; note = 2'-O-methyl modified nucleotide
  modified_base 14: mod_base = OTHER; note = 2'-O-methyl modified nucleotide
  modified_base 15: mod_base = OTHER; note = 2'-O-methyl modified nucleotide
  modified_base 16: mod_base = OTHER; note = 2'-fluoro modified nucleotide
  modified_base 17: mod_base = OTHER; note = 2'-fluoro modified nucleotide
  modified_base 18: mod_base = OTHER; note = 2'-O-methyl modified nucleotide
  modified_base 19: mod_base = OTHER; note = 2'-O-methyl modified nucleotide
  modified_base 20: mod_base = OTHER; note = 2'-O-methyl modified nucleotide
  modified_base 21: mod_base = OTHER; note = 2'-O-methyl modified nucleotide
gatcatcattctcttgtgcaa

SEQ ID NO: 259 - RNA, 21 nt, synthetic construct
  source 1..21: mol_type = other RNA
  modified_base 1: mod_base = OTHER; note = 2'-O-methyl modified nucleotide with phosphorothioate linkage
  modified_base 2: mod_base = OTHER; note = 2'-O-methyl modified nucleotide with phosphorothioate linkage
  modified_base 3: mod_base = OTHER; note = 2'-O-methyl modified nucleotide
  modified_base 4: mod_base = OTHER; note = 2'-O-methyl modified nucleotide
  modified_base 5: mod_base = OTHER; note = 2'-O-methyl modified nucleotide
  modified_base 6: mod_base = OTHER; note = 2'-O-methyl modified nucleotide
  modified_base 7: mod_base = OTHER; note = 2'-fluoro modified nucleotide
  modified_base 8: mod_base = OTHER; note = 2'-O-methyl modified nucleotide
  modified_base 9: mod_base = OTHER; note = 2'-fluoro modified nucleotide
  modified_base 10: mod_base = OTHER; note = 2'-fluoro modified nucleotide
  modified_base 11: mod_base = OTHER; note = 2'-fluoro modified nucleotide
  modified_base 12: mod_base = OTHER; note = 2'-O-methyl modified nucleotide
  modified_base 13: mod_base = OTHER; note = 2'-O-methyl modified nucleotide
  modified_base 14: mod_base = OTHER; note = 2'-O-methyl modified nucleotide
  modified_base 15: mod_base = OTHER; note = 2'-O-methyl modified nucleotide
  modified_base 16: mod_base = OTHER; note = 2'-fluoro modified nucleotide
  modified_base 17: mod_base = OTHER; note = 2'-fluoro modified nucleotide
  modified_base 18: mod_base = OTHER; note = 2'-O-methyl modified nucleotide
  modified_base 19: mod_base = OTHER; note = 2'-O-methyl modified nucleotide
  modified_base 20: mod_base = OTHER; note = 2'-O-methyl modified nucleotide
  modified_base 21: mod_base = OTHER; note = 2'-O-methyl modified nucleotide
tgtggccgtcacagttctcta

SEQ ID NO: 260 - RNA, 21 nt, synthetic construct
  source 1..21: mol_type = other RNA
  modified_base 1: mod_base = OTHER; note = 2'-O-methyl modified nucleotide with phosphorothioate linkage
  modified_base 2: mod_base = OTHER; note = 2'-O-methyl modified nucleotide with phosphorothioate linkage
  modified_base 3: mod_base = OTHER; note = 2'-O-methyl modified nucleotide
  modified_base 4: mod_base = OTHER; note = 2'-O-methyl modified nucleotide
  modified_base 5: mod_base = OTHER; note = 2'-O-methyl modified nucleotide
  modified_base 6: mod_base = OTHER; note = 2'-O-methyl modified nucleotide
  modified_base 7: mod_base = OTHER; note = 2'-fluoro modified nucleotide
  modified_base 8: mod_base = OTHER; note = 2'-O-methyl modified nucleotide
  modified_base 9: mod_base = OTHER; note = 2'-fluoro modified nucleotide
  modified_base 10: mod_base = OTHER; note = 2'-fluoro modified nucleotide
  modified_base 11: mod_base = OTHER; note = 2'-fluoro modified nucleotide
  modified_base 12: mod_base = OTHER; note = 2'-O-methyl modified nucleotide
  modified_base 13: mod_base = OTHER; note = 2'-O-methyl modified nucleotide
  modified_base 14: mod_base = OTHER; note = 2'-O-methyl modified nucleotide
  modified_base 15: mod_base = OTHER; note = 2'-O-methyl modified nucleotide
  modified_base 16: mod_base = OTHER; note = 2'-fluoro modified nucleotide
  modified_base 17: mod_base = OTHER; note = 2'-fluoro modified nucleotide
  modified_base 18: mod_base = OTHER; note = 2'-O-methyl modified nucleotide
  modified_base 19: mod_base = OTHER; note = 2'-O-methyl modified nucleotide
  modified_base 20: mod_base = OTHER; note = 2'-O-methyl modified nucleotide
  modified_base 21: mod_base = OTHER; note = 2'-O-methyl modified nucleotide
tctggtcccaaagcaattcta

SEQ ID NO: 261 - RNA, 21 nt, synthetic construct
  source 1..21: mol_type = other RNA
  modified_base 1: mod_base = OTHER; note = 2'-O-methyl modified nucleotide with phosphorothioate linkage
  modified_base 2: mod_base = OTHER; note = 2'-O-methyl modified nucleotide with phosphorothioate linkage
  modified_base 3: mod_base = OTHER; note = 2'-O-methyl modified nucleotide
  modified_base 4: mod_base = OTHER; note = 2'-O-methyl modified nucleotide
  modified_base 5: mod_base = OTHER; note = 2'-O-methyl modified nucleotide
  modified_base 6: mod_base = OTHER; note = 2'-O-methyl modified nucleotide
  modified_base 7: mod_base = OTHER; note = 2'-fluoro modified nucleotide
  modified_base 8: mod_base = OTHER; note = 2'-O-methyl modified nucleotide
  modified_base 9: mod_base = OTHER; note = 2'-fluoro modified nucleotide
  modified_base 10: mod_base = OTHER; note = 2'-fluoro modified nucleotide
  modified_base 11: mod_base = OTHER; note = 2'-fluoro modified nucleotide
  modified_base 12: mod_base = OTHER; note = 2'-O-methyl modified nucleotide
  modified_base 13: mod_base = OTHER; note = 2'-O-methyl modified nucleotide
  modified_base 14: mod_base = OTHER; note = 2'-O-methyl modified nucleotide
  modified_base 15: mod_base = OTHER; note = 2'-O-methyl modified nucleotide
  modified_base 16: mod_base = OTHER; note = 2'-fluoro modified nucleotide
  modified_base 17: mod_base = OTHER; note = 2'-fluoro modified nucleotide
  modified_base 18: mod_base = OTHER; note = 2'-O-methyl modified nucleotide
  modified_base 19: mod_base = OTHER; note = 2'-O-methyl modified nucleotide
  modified_base 20: mod_base = OTHER; note = 2'-O-methyl modified nucleotide
  modified_base 21: mod_base = OTHER; note = 2'-O-methyl modified nucleotide
tttccagtacatctatcagaa

SEQ ID NO: 262 - RNA, 21 nt, synthetic construct
  source 1..21: mol_type = other RNA
  modified_base 1: mod_base = OTHER; note = 2'-O-methyl modified nucleotide with phosphorothioate linkage
  modified_base 2: mod_base = OTHER; note = 2'-O-methyl modified nucleotide with phosphorothioate linkage
  modified_base 3: mod_base = OTHER; note = 2'-O-methyl modified nucleotide
  modified_base 4: mod_base = OTHER; note = 2'-O-methyl modified nucleotide
  modified_base 5: mod_base = OTHER; note = 2'-O-methyl modified nucleotide
  modified_base 6: mod_base = OTHER; note = 2'-O-methyl modified nucleotide
  modified_base 7: mod_base = OTHER; note = 2'-fluoro modified nucleotide
  modified_base 8: mod_base = OTHER; note = 2'-O-methyl modified nucleotide
  modified_base 9: mod_base = OTHER; note = 2'-fluoro modified nucleotide
  modified_base 10: mod_base = OTHER; note = 2'-fluoro modified nucleotide
  modified_base 11: mod_base = OTHER; note = 2'-fluoro modified nucleotide
  modified_base 12: mod_base = OTHER; note = 2'-O-methyl modified nucleotide
  modified_base 13: mod_base = OTHER; note = 2'-O-methyl modified nucleotide
  modified_base 14: mod_base = OTHER; note = 2'-O-methyl modified nucleotide
  modified_base 15: mod_base = OTHER; note = 2'-O-methyl modified nucleotide
  modified_base 16: mod_base = OTHER; note = 2'-fluoro modified nucleotide
  modified_base 17: mod_base = OTHER; note = 2'-fluoro modified nucleotide
  modified_base 18: mod_base = OTHER; note = 2'-O-methyl modified nucleotide
  modified_base 19: mod_base = OTHER; note = 2'-O-methyl modified nucleotide
  modified_base 20: mod_base = OTHER; note = 2'-O-methyl modified nucleotide
  modified_base 21: mod_base = OTHER; note = 2'-O-methyl modified nucleotide
ttccagtacatctatcagaaa

SEQ ID NO: 263 - RNA, 21 nt, synthetic construct
  source 1..21: mol_type = other RNA
  modified_base 1: mod_base = OTHER; note = 2'-O-methyl modified nucleotide with phosphorothioate linkage
  modified_base 2: mod_base = OTHER; note = 2'-O-methyl modified nucleotide with phosphorothioate linkage
  modified_base 3: mod_base = OTHER; note = 2'-O-methyl modified nucleotide
  modified_base 4: mod_base = OTHER; note = 2'-O-methyl modified nucleotide
  modified_base 5: mod_base = OTHER; note = 2'-O-methyl modified nucleotide
  modified_base 6: mod_base = OTHER; note = 2'-O-methyl modified nucleotide
  modified_base 7: mod_base = OTHER; note = 2'-fluoro modified nucleotide
  modified_base 8: mod_base = OTHER; note = 2'-O-methyl modified nucleotide
  modified_base 9: mod_base = OTHER; note = 2'-fluoro modified nucleotide
  modified_base 10: mod_base = OTHER; note = 2'-fluoro modified nucleotide
  modified_base 11: mod_base = OTHER; note = 2'-fluoro modified nucleotide
  modified_base 12: mod_base = OTHER; note = 2'-O-methyl modified nucleotide
  modified_base 13: mod_base = OTHER; note = 2'-O-methyl modified nucleotide
  modified_base 14: mod_base = OTHER; note = 2'-O-methyl modified nucleotide
  modified_base 15: mod_base = OTHER; note = 2'-O-methyl modified nucleotide
  modified_base 16: mod_base = OTHER; note = 2'-fluoro modified nucleotide
  modified_base 17: mod_base = OTHER; note = 2'-fluoro modified nucleotide
  modified_base 18: mod_base = OTHER; note = 2'-O-methyl modified nucleotide
  modified_base 19: mod_base = OTHER; note = 2'-O-methyl modified nucleotide
  modified_base 20: mod_base = OTHER; note = 2'-O-methyl modified nucleotide
  modified_base 21: mod_base = OTHER; note = 2'-O-methyl modified nucleotide
acatctatcagaatcatcaaa

SEQ ID NO: 264 - RNA, 21 nt, synthetic construct
  source 1..21: mol_type = other RNA
  modified_base 1: mod_base = OTHER; note = 2'-O-methyl modified nucleotide with phosphorothioate linkage
  modified_base 2: mod_base = OTHER; note = 2'-O-methyl modified nucleotide with phosphorothioate linkage
  modified_base 3: mod_base = OTHER; note = 2'-O-methyl modified nucleotide
  modified_base 4: mod_base = OTHER; note = 2'-O-methyl modified nucleotide
  modified_base 5: mod_base = OTHER; note = 2'-O-methyl modified nucleotide
  modified_base 6: mod_base = OTHER; note = 2'-O-methyl modified nucleotide
  modified_base 7: mod_base = OTHER; note = 2'-fluoro modified nucleotide
  modified_base 8: mod_base = OTHER; note = 2'-O-methyl modified nucleotide
  modified_base 9: mod_base = OTHER; note = 2'-fluoro modified nucleotide
  modified_base 10: mod_base = OTHER; note = 2'-fluoro modified nucleotide
  modified_base 11: mod_base = OTHER; note = 2'-fluoro modified nucleotide
  modified_base 12: mod_base = OTHER; note = 2'-O-methyl modified nucleotide
  modified_base 13: mod_base = OTHER; note = 2'-O-methyl modified nucleotide
  modified_base 14: mod_base = OTHER; note = 2'-O-methyl modified nucleotide
  modified_base 15: mod_base = OTHER; note = 2'-O-methyl modified nucleotide
  modified_base 16: mod_base = OTHER; note = 2'-fluoro modified nucleotide
  modified_base 17: mod_base = OTHER; note = 2'-fluoro modified nucleotide
  modified_base 18: mod_base = OTHER; note = 2'-O-methyl modified nucleotide
  modified_base 19: mod_base = OTHER; note = 2'-O-methyl modified nucleotide
  modified_base 20: mod_base = OTHER; note = 2'-O-methyl modified nucleotide
  modified_base 21: mod_base = OTHER; note = 2'-O-methyl modified nucleotide
taaagtcactcaattcctgaa

SEQ ID NO: 265 - RNA, 21 nt, synthetic construct
  source 1..21: mol_type = other RNA
  modified_base 1: mod_base = OTHER; note = 2'-O-methyl modified nucleotide with phosphorothioate linkage
  modified_base 2: mod_base = OTHER; note = 2'-O-methyl modified nucleotide with phosphorothioate linkage
  modified_base 3: mod_base = OTHER; note = 2'-O-methyl modified nucleotide
  modified_base 4: mod_base = OTHER; note = 2'-O-methyl modified nucleotide
  modified_base 5: mod_base = OTHER; note = 2'-O-methyl modified nucleotide
  modified_base 6: mod_base = OTHER; note = 2'-O-methyl modified nucleotide
  modified_base 7: mod_base = OTHER; note = 2'-fluoro modified nucleotide
  modified_base 8: mod_base = OTHER; note = 2'-O-methyl modified nucleotide
  modified_base 9: mod_base = OTHER; note = 2'-fluoro modified nucleotide
  modified_base 10: mod_base = OTHER; note = 2'-fluoro modified nucleotide
  modified_base 11: mod_base = OTHER; note = 2'-fluoro modified nucleotide
  modified_base 12: mod_base = OTHER; note = 2'-O-methyl modified nucleotide
  modified_base 13: mod_base = OTHER; note = 2'-O-methyl modified nucleotide
  modified_base 14: mod_base = OTHER; note = 2'-O-methyl modified nucleotide
  modified_base 15: mod_base = OTHER; note = 2'-O-methyl modified nucleotide
  modified_base 16: mod_base = OTHER; note = 2'-fluoro modified nucleotide
  modified_base 17: mod_base = OTHER; note = 2'-fluoro modified nucleotide
  modified_base 18: mod_base = OTHER; note = 2'-O-methyl modified nucleotide
  modified_base 19: mod_base = OTHER; note = 2'-O-methyl modified nucleotide
  modified_base 20: mod_base = OTHER; note = 2'-O-methyl modified nucleotide
  modified_base 21: mod_base = OTHER; note = 2'-O-methyl modified nucleotide
ttcctgaactaatcaatataa

SEQ ID NO: 266 - RNA, 21 nt, synthetic construct
  source 1..21: mol_type = other RNA
  modified_base 1: mod_base = OTHER; note = 2'-O-methyl modified nucleotide with phosphorothioate linkage
  modified_base 2: mod_base = OTHER; note = 2'-O-methyl modified nucleotide with phosphorothioate linkage
  modified_base 3: mod_base = OTHER; note = 2'-O-methyl modified nucleotide
  modified_base 4: mod_base = OTHER; note = 2'-O-methyl modified nucleotide
  modified_base 5: mod_base = OTHER; note = 2'-O-methyl modified nucleotide
  modified_base 6: mod_base = OTHER; note = 2'-O-methyl modified nucleotide
  modified_base 7: mod_base = OTHER; note = 2'-fluoro modified nucleotide
  modified_base 8: mod_base = OTHER; note = 2'-O-methyl modified nucleotide
  modified_base 9: mod_base = OTHER; note = 2'-fluoro modified nucleotide
  modified_base 10: mod_base = OTHER; note = 2'-fluoro modified nucleotide
  modified_base 11: mod_base = OTHER; note = 2'-fluoro modified nucleotide
  modified_base 12: mod_base = OTHER; note = 2'-O-methyl modified nucleotide
  modified_base 13: mod_base = OTHER; note = 2'-O-methyl modified nucleotide
  modified_base 14: mod_base = OTHER; note = 2'-O-methyl modified nucleotide
  modified_base 15: mod_base = OTHER; note = 2'-O-methyl modified nucleotide
  modified_base 16: mod_base = OTHER; note = 2'-fluoro modified nucleotide
  modified_base 17: mod_base = OTHER; note = 2'-fluoro modified nucleotide
  modified_base 18: mod_base = OTHER; note = 2'-O-methyl modified nucleotide
  modified_base 19: mod_base = OTHER; note = 2'-O-methyl modified nucleotide
  modified_base 20: mod_base = OTHER; note = 2'-O-methyl modified nucleotide
  modified_base 21: mod_base = OTHER; note = 2'-O-methyl modified nucleotide
cctgaactaatcaatatataa

SEQ ID NO: 267 - RNA, 21 nt, synthetic construct
  source 1..21: mol_type = other RNA
  modified_base 1: mod_base = OTHER; note = 2'-O-methyl modified nucleotide with phosphorothioate linkage
  modified_base 2: mod_base = OTHER; note = 2'-O-methyl modified nucleotide with phosphorothioate linkage
  modified_base 3: mod_base = OTHER; note = 2'-O-methyl modified nucleotide
  modified_base 4: mod_base = OTHER; note = 2'-O-methyl modified nucleotide
  modified_base 5: mod_base = OTHER; note = 2'-O-methyl modified nucleotide
  modified_base 6: mod_base = OTHER; note = 2'-O-methyl modified nucleotide
  modified_base 7: mod_base = OTHER; note = 2'-fluoro modified nucleotide
  modified_base 8: mod_base = OTHER; note = 2'-O-methyl modified nucleotide
  modified_base 9: mod_base = OTHER; note = 2'-fluoro modified nucleotide
  modified_base 10: mod_base = OTHER; note = 2'-fluoro modified nucleotide
  modified_base 11: mod_base = OTHER; note = 2'-fluoro modified nucleotide
  modified_base 12: mod_base = OTHER; note = 2'-O-methyl modified nucleotide
  modified_base 13: mod_base = OTHER; note = 2'-O-methyl modified nucleotide
  modified_base 14: mod_base = OTHER; note = 2'-O-methyl modified nucleotide
  modified_base 15: mod_base = OTHER; note = 2'-O-methyl modified nucleotide
  modified_base 16: mod_base = OTHER; note = 2'-fluoro modified nucleotide
  modified_base 17: mod_base = OTHER; note = 2'-fluoro modified nucleotide
  modified_base 18: mod_base = OTHER; note = 2'-O-methyl modified nucleotide
  modified_base 19: mod_base = OTHER; note = 2'-O-methyl modified nucleotide
  modified_base 20: mod_base = OTHER; note = 2'-O-methyl modified nucleotide
  modified_base 21: mod_base = OTHER; note = 2'-O-methyl modified nucleotide
cctggttctcattccttgcaa

SEQ ID NO: 268 - RNA, 21 nt, synthetic construct
  source 1..21: mol_type = other RNA
  modified_base 1: mod_base = OTHER; note = 2'-O-methyl modified nucleotide with phosphorothioate linkage
  modified_base 2: mod_base = OTHER; note = 2'-O-methyl modified nucleotide with phosphorothioate linkage
  modified_base 3: mod_base = OTHER; note = 2'-O-methyl modified nucleotide
  modified_base 4: mod_base = OTHER; note = 2'-O-methyl modified nucleotide
  modified_base 5: mod_base = OTHER; note = 2'-O-methyl modified nucleotide
  modified_base 6: mod_base = OTHER; note = 2'-O-methyl modified nucleotide
  modified_base 7: mod_base = OTHER; note = 2'-fluoro modified nucleotide
  modified_base 8: mod_base = OTHER; note = 2'-O-methyl modified nucleotide
  modified_base 9: mod_base = OTHER; note = 2'-fluoro modified nucleotide
  modified_base 10: mod_base = OTHER; note = 2'-fluoro modified nucleotide
  modified_base 11: mod_base = OTHER; note = 2'-fluoro modified nucleotide
  modified_base 12: mod_base = OTHER; note = 2'-O-methyl modified nucleotide
  modified_base 13: mod_base = OTHER; note = 2'-O-methyl modified nucleotide
  modified_base 14: mod_base = OTHER; note = 2'-O-methyl modified nucleotide
  modified_base 15: mod_base = OTHER; note = 2'-O-methyl modified nucleotide
  modified_base 16: mod_base = OTHER; note = 2'-fluoro modified nucleotide
  modified_base 17: mod_base = OTHER; note = 2'-fluoro modified nucleotide
  modified_base 18: mod_base = OTHER; note = 2'-O-methyl modified nucleotide
  modified_base 19: mod_base = OTHER; note = 2'-O-methyl modified nucleotide
  modified_base 20: mod_base = OTHER; note = 2'-O-methyl modified nucleotide
  modified_base 21: mod_base = OTHER; note = 2'-O-methyl modified nucleotide
ttctcattccttgcaccataa

SEQ ID NO: 269 - RNA, 21 nt, synthetic construct
  source 1..21: mol_type = other RNA
  modified_base 1: mod_base = OTHER; note = 2'-O-methyl modified nucleotide with phosphorothioate linkage
  modified_base 2: mod_base = OTHER; note = 2'-O-methyl modified nucleotide with phosphorothioate linkage
  modified_base 3: mod_base = OTHER; note = 2'-O-methyl modified nucleotide
  modified_base 4: mod_base = OTHER; note = 2'-O-methyl modified nucleotide
  modified_base 5: mod_base = OTHER; note = 2'-O-methyl modified nucleotide
  modified_base 6: mod_base = OTHER; note = 2'-O-methyl modified nucleotide
  modified_base 7: mod_base = OTHER; note = 2'-fluoro modified nucleotide
  modified_base 8: mod_base = OTHER; note = 2'-O-methyl modified nucleotide
  modified_base 9: mod_base = OTHER; note = 2'-fluoro modified nucleotide
  modified_base 10: mod_base = OTHER; note = 2'-fluoro modified nucleotide
  modified_base 11: mod_base = OTHER; note = 2'-fluoro modified nucleotide
  modified_base 12: mod_base = OTHER; note = 2'-O-methyl modified nucleotide
  modified_base 13: mod_base = OTHER; note = 2'-O-methyl modified nucleotide
  modified_base 14: mod_base = OTHER; note = 2'-O-methyl modified nucleotide
  modified_base 15: mod_base = OTHER; note = 2'-O-methyl modified nucleotide
  modified_base 16: mod_base = OTHER; note = 2'-fluoro modified nucleotide
  modified_base 17: mod_base = OTHER; note = 2'-fluoro modified nucleotide
  modified_base 18: mod_base = OTHER; note = 2'-O-methyl modified nucleotide
  modified_base 19: mod_base = OTHER; note = 2'-O-methyl modified nucleotide
  modified_base 20: mod_base = OTHER; note = 2'-O-methyl modified nucleotide
  modified_base 21: mod_base = OTHER; note = 2'-O-methyl modified nucleotide
tattggctttctgctgggtta

SEQ ID NO: 270 - RNA, 21 nt, synthetic construct
  source 1..21: mol_type = other RNA
  modified_base 1: mod_base = OTHER; note = 2'-O-methyl modified nucleotide with phosphorothioate linkage
  modified_base 2: mod_base = OTHER; note = 2'-O-methyl modified nucleotide with phosphorothioate linkage
  modified_base 3: mod_base = OTHER; note = 2'-O-methyl modified nucleotide
  modified_base 4: mod_base = OTHER; note = 2'-O-methyl modified nucleotide
  modified_base 5: mod_base = OTHER; note = 2'-O-methyl modified nucleotide
  modified_base 6: mod_base = OTHER; note = 2'-O-methyl modified nucleotide
  modified_base 7: mod_base = OTHER; note = 2'-fluoro modified nucleotide
  modified_base 8: mod_base = OTHER; note = 2'-O-methyl modified nucleotide
  modified_base 9: mod_base = OTHER; note = 2'-fluoro modified nucleotide
  modified_base 10: mod_base = OTHER; note = 2'-fluoro modified nucleotide
  modified_base 11: mod_base = OTHER; note = 2'-fluoro modified nucleotide
  modified_base 12: mod_base = OTHER; note = 2'-O-methyl modified nucleotide
  modified_base 13: mod_base = OTHER; note = 2'-O-methyl modified nucleotide
  modified_base 14: mod_base = OTHER; note = 2'-O-methyl modified nucleotide
  modified_base 15: mod_base = OTHER; note = 2'-O-methyl modified nucleotide
  modified_base 16: mod_base = OTHER; note = 2'-fluoro modified nucleotide
  modified_base 17: mod_base = OTHER; note = 2'-fluoro modified nucleotide
  modified_base 18: mod_base = OTHER; note = 2'-O-methyl modified nucleotide
  modified_base 19: mod_base = OTHER; note = 2'-O-methyl modified nucleotide
  modified_base 20: mod_base = OTHER; note = 2'-O-methyl modified nucleotide
  modified_base 21: mod_base = OTHER; note = 2'-O-methyl modified nucleotide
cctcctctacatgattttcca

SEQ ID NO: 271 - RNA, 21 nt, synthetic construct
  source 1..21: mol_type = other RNA
  modified_base 1: mod_base = OTHER; note = 2'-O-methyl modified nucleotide with phosphorothioate linkage
  modified_base 2: mod_base = OTHER; note = 2'-fluoro modified nucleotide with phosphorothioate linkage
  modified_base 3: mod_base = OTHER; note = 2'-O-methyl modified nucleotide
  modified_base 4: mod_base = OTHER; note = 2'-O-methyl modified nucleotide
  modified_base 5: mod_base = OTHER; note = 2'-O-methyl modified nucleotide
  modified_base 6: mod_base = OTHER; note = 2'-fluoro modified nucleotide
  modified_base 7: mod_base = OTHER; note = 2'-O-methyl modified nucleotide
  modified_base 8: mod_base = OTHER; note = 2'-O-methyl modified nucleotide
  modified_base 9: mod_base = OTHER; note = 2'-O-methyl modified nucleotide
  modified_base 10: mod_base = OTHER; note = 2'-O-methyl modified nucleotide
  modified_base 11: mod_base = OTHER; note = 2'-O-methyl modified nucleotide
  modified_base 12: mod_base = OTHER; note = 2'-O-methyl modified nucleotide
  modified_base 13: mod_base = OTHER; note = 2'-O-methyl modified nucleotide
  modified_base 14: mod_base = OTHER; note = 2'-fluoro modified nucleotide
  modified_base 15: mod_base = OTHER; note = 2'-O-methyl modified nucleotide
  modified_base 16: mod_base = OTHER; note = 2'-fluoro modified nucleotide
  modified_base 17: mod_base = OTHER; note = 2'-O-methyl modified nucleotide
  modified_base 18: mod_base = OTHER; note = 2'-O-methyl modified nucleotide
  modified_base 19: mod_base = OTHER; note = 2'-O-methyl modified nucleotide with phosphorothioate linkage
  modified_base 20: mod_base = OTHER; note = 2'-O-methyl modified nucleotide with phosphorothioate linkage
  modified_base 21: mod_base = OTHER; note = 2'-O-methyl modified nucleotide
tataagtgagccttgatcttg

SEQ ID NO: 272 - RNA, 21 nt, synthetic construct
  source 1..21: mol_type = other RNA
  modified_base 1: mod_base = OTHER; note = 2'-O-methyl modified nucleotide with phosphorothioate linkage
  modified_base 2: mod_base = OTHER; note = 2'-fluoro modified nucleotide with phosphorothioate linkage
  modified_base 3: mod_base = OTHER; note = 2'-O-methyl modified nucleotide
  modified_base 4: mod_base = OTHER; note = 2'-O-methyl modified nucleotide
  modified_base 5: mod_base = OTHER; note = 2'-O-methyl modified nucleotide
  modified_base 6: mod_base = OTHER; note = 2'-fluoro modified nucleotide
  modified_base 7: mod_base = OTHER; note = 2'-O-methyl modified nucleotide
  modified_base 8: mod_base = OTHER; note = 2'-O-methyl modified nucleotide
  modified_base 9: mod_base = OTHER; note = 2'-O-methyl modified nucleotide
  modified_base 10: mod_base = OTHER; note = 2'-O-methyl modified nucleotide
  modified_base 11: mod_base = OTHER; note = 2'-O-methyl modified nucleotide
  modified_base 12: mod_base = OTHER; note = 2'-O-methyl modified nucleotide
  modified_base 13: mod_base = OTHER; note = 2'-O-methyl modified nucleotide
  modified_base 14: mod_base = OTHER; note = 2'-fluoro modified nucleotide
  modified_base 15: mod_base = OTHER; note = 2'-O-methyl modified nucleotide
  modified_base 16: mod_base = OTHER; note = 2'-fluoro modified nucleotide
  modified_base 17: mod_base = OTHER; note = 2'-O-methyl modified nucleotide
  modified_base 18: mod_base = OTHER; note = 2'-O-methyl modified nucleotide
  modified_base 19: mod_base = OTHER; note = 2'-O-methyl modified nucleotide with phosphorothioate linkage
  modified_base 20: mod_base = OTHER; note = 2'-O-methyl modified nucleotide with phosphorothioate linkage
  modified_base 21: mod_base = OTHER; note = 2'-O-methyl modified nucleotide
ttggtcatcacaatgctgagg

SEQ ID NO: 273 - RNA, 21 nt, synthetic construct
  source 1..21: mol_type = other RNA
  modified_base 1: mod_base = OTHER; note = 2'-O-methyl modified nucleotide with phosphorothioate linkage
  modified_base 2: mod_base = OTHER; note = 2'-fluoro modified nucleotide with phosphorothioate linkage
  modified_base 3: mod_base = OTHER; note = 2'-O-methyl modified nucleotide
  modified_base 4: mod_base = OTHER; note = 2'-O-methyl modified nucleotide
  modified_base 5: mod_base = OTHER; note = 2'-O-methyl modified nucleotide
  modified_base 6: mod_base = OTHER; note = 2'-fluoro modified nucleotide
  modified_base 7: mod_base = OTHER; note = 2'-O-methyl modified nucleotide
  modified_base 8: mod_base = OTHER; note = 2'-O-methyl modified nucleotide
  modified_base 9: mod_base = OTHER; note = 2'-O-methyl modified nucleotide
  modified_base 10: mod_base = OTHER; note = 2'-O-methyl modified nucleotide
  modified_base 11: mod_base = OTHER; note = 2'-O-methyl modified nucleotide
  modified_base 12: mod_base = OTHER; note = 2'-O-methyl modified nucleotide
  modified_base 13: mod_base = OTHER; note = 2'-O-methyl modified nucleotide
  modified_base 14: mod_base = OTHER; note = 2'-fluoro modified nucleotide
  modified_base 15: mod_base = OTHER; note = 2'-O-methyl modified nucleotide
  modified_base 16: mod_base = OTHER; note = 2'-fluoro modified nucleotide
  modified_base 17: mod_base = OTHER; note = 2'-O-methyl modified nucleotide
  modified_base 18: mod_base = OTHER; note = 2'-O-methyl modified nucleotide
  modified_base 19: mod_base = OTHER; note = 2'-O-methyl modified nucleotide with phosphorothioate linkage
  modified_base 20: mod_base = OTHER; note = 2'-O-methyl modified nucleotide with phosphorothioate linkage
  modified_base 21: mod_base = OTHER; note = 2'-O-methyl modified nucleotide
ttgcacaagagaatgatgatc

SEQ ID NO: 274 - RNA, 21 nt, synthetic construct
  source 1..21: mol_type = other RNA
  modified_base 1: mod_base = OTHER; note = 2'-O-methyl modified nucleotide with phosphorothioate linkage
  modified_base 2: mod_base = OTHER; note = 2'-fluoro modified nucleotide with phosphorothioate linkage
  modified_base 3: mod_base = OTHER; note = 2'-O-methyl modified nucleotide
  modified_base 4: mod_base = OTHER; note = 2'-O-methyl modified nucleotide
  modified_base 5: mod_base = OTHER; note = 2'-O-methyl modified nucleotide
  modified_base 6: mod_base = OTHER; note = 2'-fluoro modified nucleotide
  modified_base 7: mod_base = OTHER; note = 2'-O-methyl modified nucleotide
  modified_base 8: mod_base = OTHER; note = 2'-O-methyl modified nucleotide
  modified_base 9: mod_base = OTHER; note = 2'-O-methyl modified nucleotide
  modified_base 10: mod_base = OTHER; note = 2'-O-methyl modified nucleotide
  modified_base 11: mod_base = OTHER; note = 2'-O-methyl modified nucleotide
  modified_base 12: mod_base = OTHER; note = 2'-O-methyl modified nucleotide
  modified_base 13: mod_base = OTHER; note = 2'-O-methyl modified nucleotide
  modified_base 14: mod_base = OTHER; note = 2'-fluoro modified nucleotide
  modified_base 15: mod_base = OTHER; note = 2'-O-methyl modified nucleotide
  modified_base 16: mod_base = OTHER; note = 2'-fluoro modified nucleotide
  modified_base 17: mod_base = OTHER; note = 2'-O-methyl modified nucleotide
  modified_base 18: mod_base = OTHER; note = 2'-O-methyl modified nucleotide
  modified_base 19: mod_base = OTHER; note = 2'-O-methyl modified nucleotide with phosphorothioate linkage
  modified_base 20: mod_base = OTHER; note = 2'-O-methyl modified nucleotide with phosphorothioate linkage
  modified_base 21: mod_base = OTHER; note = 2'-O-methyl modified nucleotide
tagagaactgtgacggccaca

SEQ ID NO: 275 - RNA, 21 nt, synthetic construct
  source 1..21: mol_type = other RNA
  modified_base 1: mod_base = OTHER; note = 2'-O-methyl modified nucleotide with phosphorothioate linkage
  modified_base 2: mod_base = OTHER; note = 2'-fluoro modified nucleotide with phosphorothioate linkage
  modified_base 3: mod_base = OTHER; note = 2'-O-methyl modified nucleotide
  modified_base 4: mod_base = OTHER; note = 2'-O-methyl modified nucleotide
  modified_base 5: mod_base = OTHER; note = 2'-O-methyl modified nucleotide
  modified_base 6: mod_base = OTHER; note = 2'-fluoro modified nucleotide
  modified_base 7: mod_base = OTHER; note = 2'-O-methyl modified nucleotide
  modified_base 8: mod_base = OTHER; note = 2'-O-methyl modified nucleotide
  modified_base 9: mod_base = OTHER; note = 2'-O-methyl modified nucleotide
  modified_base 10: mod_base = OTHER; note = 2'-O-methyl modified nucleotide
  modified_base 11: mod_base = OTHER; note = 2'-O-methyl modified nucleotide
  modified_base 12: mod_base = OTHER; note = 2'-O-methyl modified nucleotide
  modified_base 13: mod_base = OTHER; note = 2'-O-methyl modified nucleotide
  modified_base 14: mod_base = OTHER; note = 2'-fluoro modified nucleotide
  modified_base 15: mod_base = OTHER; note = 2'-O-methyl modified nucleotide
  modified_base 16: mod_base = OTHER; note = 2'-fluoro modified nucleotide
  modified_base 17: mod_base = OTHER; note = 2'-O-methyl modified nucleotide
  modified_base 18: mod_base = OTHER; note = 2'-O-methyl modified nucleotide
  modified_base 19: mod_base = OTHER; note = 2'-O-methyl modified nucleotide with phosphorothioate linkage
  modified_base 20: mod_base = OTHER; note = 2'-O-methyl modified nucleotide with phosphorothioate linkage
  modified_base 21: mod_base = OTHER; note = 2'-O-methyl modified nucleotide
tagaattgctttgggaccaga

SEQ ID NO: 276 - RNA, 21 nt, synthetic construct
  source 1..21: mol_type = other RNA
  modified_base 1: mod_base = OTHER; note = 2'-O-methyl modified nucleotide with phosphorothioate linkage
  modified_base 2: mod_base = OTHER; note = 2'-fluoro modified nucleotide with phosphorothioate linkage
  modified_base 3: mod_base = OTHER; note = 2'-O-methyl modified nucleotide
  modified_base 4: mod_base = OTHER; note = 2'-O-methyl modified nucleotide
  modified_base 5: mod_base = OTHER; note = 2'-O-methyl modified nucleotide
  modified_base 6: mod_base = OTHER; note = 2'-fluoro modified nucleotide
  modified_base 7: mod_base = OTHER; note = 2'-O-methyl modified nucleotide
  modified_base 8: mod_base = OTHER; note = 2'-O-methyl modified nucleotide
  modified_base 9: mod_base = OTHER; note = 2'-O-methyl modified nucleotide
  modified_base 10: mod_base = OTHER; note = 2'-O-methyl modified nucleotide
  modified_base 11: mod_base = OTHER; note = 2'-O-methyl modified nucleotide
  modified_base 12: mod_base = OTHER; note = 2'-O-methyl modified nucleotide
  modified_base 13: mod_base = OTHER; note = 2'-O-methyl modified nucleotide
  modified_base 14: mod_base = OTHER; note = 2'-fluoro modified nucleotide
  modified_base 15: mod_base = OTHER; note = 2'-O-methyl modified nucleotide
  modified_base 16: mod_base = OTHER; note = 2'-fluoro modified nucleotide
  modified_base 17: mod_base = OTHER; note = 2'-O-methyl modified nucleotide
  modified_base 18: mod_base = OTHER; note = 2'-O-methyl modified nucleotide
  modified_base 19: mod_base = OTHER; note = 2'-O-methyl modified nucleotide with phosphorothioate linkage
  modified_base 20: mod_base = OTHER; note = 2'-O-methyl modified nucleotide with phosphorothioate linkage
  modified_base 21: mod_base = OTHER; note = 2'-O-methyl modified nucleotide
ttctgatagatgtactggaaa

SEQ ID NO: 277 - RNA, 21 nt, synthetic construct
  source 1..21: mol_type = other RNA
  modified_base 1: mod_base = OTHER; note = 2'-O-methyl modified nucleotide with phosphorothioate linkage
  modified_base 2: mod_base = OTHER; note = 2'-fluoro modified nucleotide with phosphorothioate linkage
  modified_base 3: mod_base = OTHER; note = 2'-O-methyl modified nucleotide
  modified_base 4: mod_base = OTHER; note = 2'-O-methyl modified nucleotide
  modified_base 5: mod_base = OTHER; note = 2'-O-methyl modified nucleotide
  modified_base 6: mod_base = OTHER; note = 2'-fluoro modified nucleotide
  modified_base 7: mod_base = OTHER; note = 2'-O-methyl modified nucleotide
  modified_base 8: mod_base = OTHER; note = 2'-O-methyl modified nucleotide
  modified_base 9: mod_base = OTHER; note = 2'-O-methyl modified nucleotide
  modified_base 10: mod_base = OTHER; note = 2'-O-methyl modified nucleotide
  modified_base 11: mod_base = OTHER; note = 2'-O-methyl modified nucleotide
  modified_base 12: mod_base = OTHER; note = 2'-O-methyl modified nucleotide
  modified_base 13: mod_base = OTHER; note = 2'-O-methyl modified nucleotide
  modified_base 14: mod_base = OTHER; note = 2'-fluoro modified nucleotide
  modified_base 15: mod_base = OTHER; note = 2'-O-methyl modified nucleotide
  modified_base 16: mod_base = OTHER; note = 2'-fluoro modified nucleotide
  modified_base 17: mod_base = OTHER; note = 2'-O-methyl modified nucleotide
  modified_base 18: mod_base = OTHER; note = 2'-O-methyl modified nucleotide
  modified_base 19: mod_base = OTHER; note = 2'-O-methyl modified nucleotide with phosphorothioate linkage
  modified_base 20: mod_base = OTHER; note = 2'-O-methyl modified nucleotide with phosphorothioate linkage
  modified_base 21: mod_base = OTHER; note = 2'-O-methyl modified nucleotide
tttctgatagatgtactggaa

SEQ ID NO: 278 - RNA, 21 nt, synthetic construct
  source 1..21: mol_type = other RNA
  modified_base 1: mod_base = OTHER; note = 2'-O-methyl modified nucleotide with phosphorothioate linkage
  modified_base 2: mod_base = OTHER; note = 2'-fluoro modified nucleotide with phosphorothioate linkage
  modified_base 3: mod_base = OTHER; note = 2'-O-methyl modified nucleotide
  modified_base 4: mod_base = OTHER; note = 2'-O-methyl modified nucleotide
  modified_base 5: mod_base = OTHER; note = 2'-O-methyl modified nucleotide
  modified_base 6: mod_base = OTHER; note = 2'-fluoro modified nucleotide
  modified_base 7: mod_base = OTHER; note = 2'-O-methyl modified nucleotide
  modified_base 8: mod_base = OTHER; note = 2'-O-methyl modified nucleotide
  modified_base 9: mod_base = OTHER; note = 2'-O-methyl modified nucleotide
  modified_base 10: mod_base = OTHER; note = 2'-O-methyl modified nucleotide
  modified_base 11: mod_base = OTHER; note = 2'-O-methyl modified nucleotide
  modified_base 12: mod_base = OTHER; note = 2'-O-methyl modified nucleotide
  modified_base 13: mod_base = OTHER; note = 2'-O-methyl modified nucleotide
  modified_base 14: mod_base = OTHER; note = 2'-fluoro modified nucleotide
  modified_base 15: mod_base = OTHER; note = 2'-O-methyl modified nucleotide
  modified_base 16: mod_base = OTHER; note = 2'-fluoro modified nucleotide
  modified_base 17: mod_base = OTHER; note = 2'-O-methyl modified nucleotide
  modified_base 18: mod_base = OTHER; note = 2'-O-methyl modified nucleotide
  modified_base 19: mod_base = OTHER; note = 2'-O-methyl modified nucleotide with phosphorothioate linkage
  modified_base 20: mod_base = OTHER; note = 2'-O-methyl modified nucleotide with phosphorothioate linkage
  modified_base 21: mod_base = OTHER; note = 2'-O-methyl modified nucleotide
tttgatgattctgatagatgt

SEQ ID NO: 279 - RNA, 21 nt, synthetic construct
  source 1..21: mol_type = other RNA
  modified_base 1: mod_base = OTHER; note = 2'-O-methyl modified nucleotide with phosphorothioate linkage
  modified_base 2: mod_base = OTHER; note = 2'-fluoro modified nucleotide with phosphorothioate linkage
  modified_base 3: mod_base = OTHER; note = 2'-O-methyl modified nucleotide
  modified_base 4: mod_base = OTHER; note = 2'-O-methyl modified nucleotide
  modified_base 5: mod_base = OTHER; note = 2'-O-methyl modified nucleotide
  modified_base 6: mod_base = OTHER; note = 2'-fluoro modified nucleotide
  modified_base 7: mod_base = OTHER; note = 2'-O-methyl modified nucleotide
  modified_base 8: mod_base = OTHER; note = 2'-O-methyl modified nucleotide
  modified_base 9: mod_base = OTHER; note = 2'-O-methyl modified nucleotide
  modified_base 10: mod_base = OTHER; note = 2'-O-methyl modified nucleotide
  modified_base 11: mod_base = OTHER; note = 2'-O-methyl modified nucleotide
  modified_base 12: mod_base = OTHER; note = 2'-O-methyl modified nucleotide
  modified_base 13: mod_base = OTHER; note = 2'-O-methyl modified nucleotide
  modified_base 14: mod_base = OTHER; note = 2'-fluoro modified nucleotide
  modified_base 15: mod_base = OTHER; note = 2'-O-methyl modified nucleotide
  modified_base 16: mod_base = OTHER; note = 2'-fluoro modified nucleotide
  modified_base 17: mod_base = OTHER; note = 2'-O-methyl modified nucleotide
  modified_base 18: mod_base = OTHER; note = 2'-O-methyl modified nucleotide
  modified_base 19: mod_base = OTHER; note = 2'-O-methyl modified nucleotide with phosphorothioate linkage
  modified_base 20: mod_base = OTHER; note = 2'-O-methyl modified nucleotide with phosphorothioate linkage
  modified_base 21: mod_base = OTHER; note = 2'-O-methyl modified nucleotide
ttcaggaattgagtgacttta

SEQ ID NO: 280 - RNA, 21 nt, synthetic construct
  source 1..21: mol_type = other RNA
  modified_base 1: mod_base = OTHER; note = 2'-O-methyl modified nucleotide with phosphorothioate linkage
  modified_base 2: mod_base = OTHER; note = 2'-fluoro modified nucleotide with phosphorothioate linkage
  modified_base 3: mod_base = OTHER; note = 2'-O-methyl modified nucleotide
  modified_base 4: mod_base = OTHER; note = 2'-O-methyl modified nucleotide
  modified_base 5: mod_base = OTHER; note = 2'-O-methyl modified nucleotide
  modified_base 6: mod_base = OTHER; note = 2'-fluoro modified nucleotide
  modified_base 7: mod_base = OTHER; note = 2'-O-methyl modified nucleotide
  modified_base 8: mod_base = OTHER; note = 2'-O-methyl modified nucleotide
  modified_base 9: mod_base = OTHER; note = 2'-O-methyl modified nucleotide
  modified_base 10: mod_base = OTHER; note = 2'-O-methyl modified nucleotide
  modified_base 11: mod_base = OTHER; note = 2'-O-methyl modified nucleotide
  modified_base 12: mod_base = OTHER; note = 2'-O-methyl modified nucleotide
  modified_base 13: mod_base = OTHER; note = 2'-O-methyl modified nucleotide
  modified_base 14: mod_base = OTHER; note = 2'-fluoro modified nucleotide
  modified_base 15: mod_base = OTHER; note = 2'-O-methyl modified nucleotide
  modified_base 16: mod_base = OTHER; note = 2'-fluoro modified nucleotide
  modified_base 17: mod_base = OTHER; note = 2'-O-methyl modified nucleotide
  modified_base 18: mod_base = OTHER; note = 2'-O-methyl modified nucleotide
  modified_base 19: mod_base = OTHER; note = 2'-O-methyl modified nucleotide with phosphorothioate linkage
  modified_base 20: mod_base = OTHER; note = 2'-O-methyl modified nucleotide with phosphorothioate linkage
  modified_base 21: mod_base = OTHER; note = 2'-O-methyl modified nucleotide
ttatattgattagttcaggaa

SEQ ID NO: 281 - RNA, 21 nt, synthetic construct
  source 1..21: mol_type = other RNA
  modified_base 1: mod_base = OTHER; note = 2'-O-methyl modified nucleotide with phosphorothioate linkage
  modified_base 2: mod_base = OTHER; note = 2'-fluoro modified nucleotide with phosphorothioate linkage
  modified_base 3: mod_base = OTHER; note = 2'-O-methyl modified nucleotide
  modified_base 4: mod_base = OTHER; note = 2'-O-methyl modified nucleotide
  modified_base 5: mod_base = OTHER; note = 2'-O-methyl modified nucleotide
  modified_base 6: mod_base = OTHER; note = 2'-fluoro modified nucleotide
  modified_base 7: mod_base = OTHER; note = 2'-O-methyl modified nucleotide
  modified_base 8: mod_base = OTHER; note = 2'-O-methyl modified nucleotide
  modified_base 9: mod_base = OTHER; note = 2'-O-methyl modified nucleotide
  modified_base 10: mod_base = OTHER; note = 2'-O-methyl modified nucleotide
  modified_base 11: mod_base = OTHER; note = 2'-O-methyl modified nucleotide
  modified_base 12: mod_base = OTHER; note = 2'-O-methyl modified nucleotide
  modified_base 13: mod_base = OTHER; note = 2'-O-methyl modified nucleotide
  modified_base 14: mod_base = OTHER; note = 2'-fluoro modified nucleotide
  modified_base 15: mod_base = OTHER; note = 2'-O-methyl modified nucleotide
  modified_base 16: mod_base = OTHER; note = 2'-fluoro modified nucleotide
  modified_base 17: mod_base = OTHER; note = 2'-O-methyl modified nucleotide
  modified_base 18: mod_base = OTHER; note = 2'-O-methyl modified nucleotide
  modified_base 19: mod_base = OTHER; note = 2'-O-methyl modified nucleotide with phosphorothioate linkage
  modified_base 20: mod_base = OTHER; note = 2'-O-methyl modified nucleotide with phosphorothioate linkage
  modified_base 21: mod_base = OTHER; note = 2'-O-methyl modified nucleotide
ttatatattgattagttcagg

SEQ ID NO: 282 - RNA, 21 nt, synthetic construct
  source 1..21: mol_type = other RNA
  modified_base 1: mod_base = OTHER; note = 2'-O-methyl modified nucleotide with phosphorothioate linkage
  modified_base 2: mod_base = OTHER; note = 2'-fluoro modified nucleotide with phosphorothioate linkage
  modified_base 3: mod_base = OTHER; note = 2'-O-methyl modified nucleotide
  modified_base 4: mod_base = OTHER; note = 2'-O-methyl modified nucleotide
  modified_base 5: mod_base = OTHER; note = 2'-O-methyl modified nucleotide
  modified_base 6: mod_base = OTHER; note = 2'-fluoro modified nucleotide
  modified_base 7: mod_base = OTHER; note = 2'-O-methyl modified nucleotide
  modified_base 8: mod_base = OTHER; note = 2'-O-methyl modified nucleotide
  modified_base 9: mod_base = OTHER; note = 2'-O-methyl modified nucleotide
  modified_base 10: mod_base = OTHER; note = 2'-O-methyl modified nucleotide
  modified_base 11: mod_base = OTHER; note = 2'-O-methyl modified nucleotide
  modified_base 12: mod_base = OTHER; note = 2'-O-methyl modified nucleotide
  modified_base 13: mod_base = OTHER; note = 2'-O-methyl modified nucleotide
  modified_base 14: mod_base = OTHER; note = 2'-fluoro modified nucleotide
  modified_base 15: mod_base = OTHER; note = 2'-O-methyl modified nucleotide
  modified_base 16: mod_base = OTHER; note = 2'-fluoro modified nucleotide
  modified_base 17: mod_base = OTHER; note = 2'-O-methyl modified nucleotide
  modified_base 18: mod_base = OTHER; note = 2'-O-methyl modified nucleotide
  modified_base 19: mod_base = OTHER; note = 2'-O-methyl modified nucleotide with phosphorothioate linkage
  modified_base 20: mod_base = OTHER; note = 2'-O-methyl modified nucleotide with phosphorothioate linkage
  modified_base 21: mod_base = OTHER; note = 2'-O-methyl modified nucleotide
ttgcaaggaatgagaaccagg

SEQ ID NO: 283 - RNA, 21 nt, synthetic construct
  source 1..21: mol_type = other RNA
  modified_base 1: mod_base = OTHER; note = 2'-O-methyl modified nucleotide with phosphorothioate linkage
  modified_base 2: mod_base = OTHER; note = 2'-fluoro modified nucleotide with phosphorothioate linkage
  modified_base 3: mod_base = OTHER; note = 2'-O-methyl modified nucleotide
  modified_base 4: mod_base = OTHER; note = 2'-O-methyl modified nucleotide
  modified_base 5: mod_base = OTHER; note = 2'-O-methyl modified nucleotide
  modified_base 6: mod_base = OTHER; note = 2'-fluoro modified nucleotide
  modified_base 7: mod_base = OTHER; note = 2'-O-methyl modified nucleotide
  modified_base 8: mod_base = OTHER; note = 2'-O-methyl modified nucleotide
  modified_base 9: mod_base = OTHER; note = 2'-O-methyl modified nucleotide
  modified_base 10: mod_base = OTHER; note = 2'-O-methyl modified nucleotide
  modified_base 11: mod_base = OTHER; note = 2'-O-methyl modified nucleotide
  modified_base 12: mod_base = OTHER; note = 2'-O-methyl modified nucleotide
  modified_base 13: mod_base = OTHER; note = 2'-O-methyl modified nucleotide
  modified_base 14: mod_base = OTHER; note = 2'-fluoro modified nucleotide
  modified_base 15: mod_base = OTHER; note = 2'-O-methyl modified nucleotide
  modified_base 16: mod_base = OTHER; note = 2'-fluoro modified nucleotide
  modified_base 17: mod_base = OTHER; note = 2'-O-methyl modified nucleotide
  modified_base 18: mod_base = OTHER; note = 2'-O-methyl modified nucleotide
  modified_base 19: mod_base = OTHER; note = 2'-O-methyl modified nucleotide with phosphorothioate linkage
  modified_base 20: mod_base = OTHER; note = 2'-O-methyl modified nucleotide with phosphorothioate linkage
  modified_base 21: mod_base = OTHER; note = 2'-O-methyl modified nucleotide
ttatggtgcaaggaatgagaa

SEQ ID NO: 284 - RNA, 21 nt, synthetic construct
  source 1..21: mol_type = other RNA
  modified_base 1: mod_base = OTHER; note = 2'-O-methyl modified nucleotide with phosphorothioate linkage
  modified_base 2: mod_base = OTHER; note = 2'-fluoro modified nucleotide with phosphorothioate linkage
  modified_base 3: mod_base = OTHER; note = 2'-O-methyl modified nucleotide
  modified_base 4: mod_base = OTHER; note = 2'-O-methyl modified nucleotide
  modified_base 5: mod_base = OTHER; note = 2'-O-methyl modified nucleotide
  modified_base 6: mod_base = OTHER; note = 2'-fluoro modified nucleotide
  modified_base 7: mod_base = OTHER; note = 2'-O-methyl modified nucleotide
  modified_base 8: mod_base = OTHER; note = 2'-O-methyl modified nucleotide
  modified_base 9: mod_base = OTHER; note = 2'-O-methyl modified nucleotide
  modified_base 10: mod_base = OTHER; note = 2'-O-methyl modified nucleotide
  modified_base 11: mod_base = OTHER; note = 2'-O-methyl modified nucleotide
  modified_base 12: mod_base = OTHER; note = 2'-O-methyl modified nucleotide
  modified_base 13: mod_base = OTHER; note = 2'-O-methyl modified nucleotide
  modified_base 14: mod_base = OTHER; note = 2'-fluoro modified nucleotide
  modified_base 15: mod_base = OTHER; note = 2'-O-methyl modified nucleotide
  modified_base 16: mod_base = OTHER; note = 2'-fluoro modified nucleotide
  modified_base 17: mod_base = OTHER; note = 2'-O-methyl modified nucleotide
  modified_base 18: mod_base = OTHER; note = 2'-O-methyl modified nucleotide
  modified_base 19: mod_base = OTHER; note = 2'-O-methyl modified nucleotide with phosphorothioate linkage
  modified_base 20: mod_base = OTHER; note = 2'-O-methyl modified nucleotide with phosphorothioate linkage
  modified_base 21: mod_base = OTHER; note = 2'-O-methyl modified nucleotide
taacccagcagaaagccaata

SEQ ID NO: 285 - RNA, 21 nt, synthetic construct
  source 1..21: mol_type = other RNA
  modified_base 1: mod_base = OTHER; note = 2'-O-methyl modified nucleotide with phosphorothioate linkage
  modified_base 2: mod_base = OTHER; note = 2'-fluoro modified nucleotide with phosphorothioate linkage
  modified_base 3: mod_base = OTHER; note = 2'-O-methyl modified nucleotide
  modified_base 4: mod_base = OTHER; note = 2'-O-methyl modified nucleotide
  modified_base 5: mod_base = OTHER; note = 2'-O-methyl modified nucleotide
  modified_base 6: mod_base = OTHER; note = 2'-fluoro modified nucleotide
  modified_base 7: mod_base = OTHER; note = 2'-O-methyl modified nucleotide
  modified_base 8: mod_base = OTHER; note = 2'-O-methyl modified nucleotide
  modified_base 9: mod_base = OTHER; note = 2'-O-methyl modified nucleotide
  modified_base 10: mod_base = OTHER; note = 2'-O-methyl modified nucleotide
  modified_base 11: mod_base = OTHER; note = 2'-O-methyl modified nucleotide
  modified_base 12: mod_base = OTHER; note = 2'-O-methyl modified nucleotide
  modified_base 13: mod_base = OTHER; note = 2'-O-methyl modified nucleotide
  modified_base 14: mod_base = OTHER; note = 2'-fluoro modified nucleotide
  modified_base 15: mod_base = OTHER; note = 2'-O-methyl modified nucleotide
  modified_base 16: mod_base = OTHER; note = 2'-fluoro modified nucleotide
  modified_base 17: mod_base = OTHER; note = 2'-O-methyl modified nucleotide
  modified_base 18: mod_base = OTHER; note = 2'-O-methyl modified nucleotide
  modified_base 19: mod_base = OTHER; note = 2'-O-methyl modified nucleotide with phosphorothioate linkage
  modified_base 20: mod_base = OTHER; note = 2'-O-methyl modified nucleotide with phosphorothioate linkage
  modified_base 21: mod_base = OTHER; note = 2'-O-methyl modified nucleotide
tggaaaatcatgtagaggagg

SEQ ID NO: 286 - RNA, 21 nt, synthetic construct
  source 1..21: mol_type = other RNA
  modified_base 1: mod_base = OTHER; note = Vinyl-phosphonate 2'-O-methyl modified nucleotide with phosphorothioate linkage
  modified_base 2: mod_base = OTHER; note = 2'-fluoro modified nucleotide with phosphorothioate linkage
  modified_base 3: mod_base = OTHER; note = 2'-O-methyl modified nucleotide
  modified_base 4: mod_base = OTHER; note = 2'-O-methyl modified nucleotide
  modified_base 5: mod_base = OTHER; note = 2'-O-methyl modified nucleotide
  modified_base 6: mod_base = OTHER; note = 2'-O-methyl modified nucleotide
  modified_base 7: mod_base = OTHER; note = 2'-O-methyl modified nucleotide
  modified_base 8: mod_base = OTHER; note = 2'-O-methyl modified nucleotide
  modified_base 9: mod_base = OTHER; note = 2'-O-methyl modified nucleotide
  modified_base 10: mod_base = OTHER; note = 2'-O-methyl modified nucleotide
  modified_base 11: mod_base = OTHER; note = 2'-O-methyl modified nucleotide
  modified_base 12: mod_base = OTHER; note = 2'-O-methyl modified nucleotide
  modified_base 13: mod_base = OTHER; note = 2'-O-methyl modified nucleotide
  modified_base 14: mod_base = OTHER; note = 2'-fluoro modified nucleotide
  modified_base 15: mod_base = OTHER; note = 2'-O-methyl modified nucleotide
  modified_base 16: mod_base = OTHER; note = 2'-O-methyl modified nucleotide
  modified_base 17: mod_base = OTHER; note = 2'-O-methyl modified nucleotide
  modified_base 18: mod_base = OTHER; note = 2'-O-methyl modified nucleotide
  modified_base 19: mod_base = OTHER; note = 2'-O-methyl modified nucleotide with phosphorothioate linkage
  modified_base 20: mod_base = OTHER; note = 2'-O-methyl modified nucleotide with phosphorothioate linkage
  modified_base 21: mod_base = OTHER; note = 2'-O-methyl modified nucleotide
tataagtgagccttgatcttg

SEQ ID NO: 287 - RNA, 21 nt, synthetic construct
  source 1..21: mol_type = other RNA
  modified_base 1: mod_base = OTHER; note = Vinyl-phosphonate 2'-O-methyl modified nucleotide with phosphorothioate linkage
  modified_base 2: mod_base = OTHER; note = 2'-fluoro modified nucleotide with phosphorothioate linkage
  modified_base 3: mod_base = OTHER; note = 2'-O-methyl modified nucleotide
  modified_base 4: mod_base = OTHER; note = 2'-O-methyl modified nucleotide
  modified_base 5: mod_base = OTHER; note = 2'-O-methyl modified nucleotide
  modified_base 6: mod_base = OTHER; note = 2'-O-methyl modified nucleotide
  modified_base 7: mod_base = OTHER; note = 2'-O-methyl modified nucleotide
  modified_base 8: mod_base = OTHER; note = 2'-O-methyl modified nucleotide
  modified_base 9: mod_base = OTHER; note = 2'-O-methyl modified nucleotide
  modified_base 10: mod_base = OTHER; note = 2'-O-methyl modified nucleotide
  modified_base 11: mod_base = OTHER; note = 2'-O-methyl modified nucleotide
  modified_base 12: mod_base = OTHER; note = 2'-O-methyl modified nucleotide
  modified_base 13: mod_base = OTHER; note = 2'-O-methyl modified nucleotide
  modified_base 14: mod_base = OTHER; note = 2'-fluoro modified nucleotide
  modified_base 15: mod_base = OTHER; note = 2'-O-methyl modified nucleotide
  modified_base 16: mod_base = OTHER; note = 2'-O-methyl modified nucleotide
  modified_base 17: mod_base = OTHER; note = 2'-O-methyl modified nucleotide
  modified_base 18: mod_base = OTHER; note = 2'-O-methyl modified nucleotide
  modified_base 19: mod_base = OTHER; note = 2'-O-methyl modified nucleotide with phosphorothioate linkage
  modified_base 20: mod_base = OTHER; note = 2'-O-methyl modified nucleotide with phosphorothioate linkage
  modified_base 21: mod_base = OTHER; note = 2'-O-methyl modified nucleotide
ttggtcatcacaatgctgagg

SEQ ID NO: 288 - RNA, 21 nt, synthetic construct
  source 1..21: mol_type = other RNA
  modified_base 1: mod_base = OTHER; note = Vinyl-phosphonate 2'-O-methyl modified nucleotide with phosphorothioate linkage
  modified_base 2: mod_base = OTHER; note = 2'-fluoro modified nucleotide with phosphorothioate linkage
  modified_base 3: mod_base = OTHER; note = 2'-O-methyl modified nucleotide
  modified_base 4: mod_base = OTHER; note = 2'-O-methyl modified nucleotide
  modified_base 5: mod_base = OTHER; note = 2'-O-methyl modified nucleotide
  modified_base 6: mod_base = OTHER; note = 2'-O-methyl modified nucleotide
  modified_base 7: mod_base = OTHER; note = 2'-O-methyl modified nucleotide
  modified_base 8: mod_base = OTHER; note = 2'-O-methyl modified nucleotide
  modified_base 9: mod_base = OTHER; note = 2'-O-methyl modified nucleotide
  modified_base 10: mod_base = OTHER; note = 2'-O-methyl modified nucleotide
  modified_base 11: mod_base = OTHER; note = 2'-O-methyl modified nucleotide
  modified_base 12: mod_base = OTHER; note = 2'-O-methyl modified nucleotide
  modified_base 13: mod_base = OTHER; note = 2'-O-methyl modified nucleotide
  modified_base 14: mod_base = OTHER; note = 2'-fluoro modified nucleotide
  modified_base 15: mod_base = OTHER; note = 2'-O-methyl modified nucleotide
  modified_base 16: mod_base = OTHER; note = 2'-O-methyl modified nucleotide
  modified_base 17: mod_base = OTHER; note = 2'-O-methyl modified nucleotide
  modified_base 18: mod_base = OTHER; note = 2'-O-methyl modified nucleotide
  modified_base 19: mod_base = OTHER; note = 2'-O-methyl modified nucleotide with phosphorothioate linkage
  modified_base 20: mod_base = OTHER; note = 2'-O-methyl modified nucleotide with phosphorothioate linkage
  modified_base 21: mod_base = OTHER; note = 2'-O-methyl modified nucleotide
ttgcacaagagaatgatgatc

SEQ ID NO: 289 - RNA, 21 nt, synthetic construct
  source 1..21: mol_type = other RNA
  modified_base 1: mod_base = OTHER; note = Vinyl-phosphonate 2'-O-methyl modified nucleotide with phosphorothioate linkage
  modified_base 2: mod_base = OTHER; note = 2'-fluoro modified nucleotide with phosphorothioate linkage
  modified_base 3: mod_base = OTHER; note = 2'-O-methyl modified nucleotide
  modified_base 4: mod_base = OTHER; note = 2'-O-methyl modified nucleotide
  modified_base 5: mod_base = OTHER; note = 2'-O-methyl modified nucleotide
  modified_base 6: mod_base = OTHER; note = 2'-O-methyl modified nucleotide
  modified_base 7: mod_base = OTHER; note = 2'-O-methyl modified nucleotide
  modified_base 8: mod_base = OTHER; note = 2'-O-methyl modified nucleotide
  modified_base 9: mod_base = OTHER; note = 2'-O-methyl modified nucleotide
  modified_base 10: mod_base = OTHER; note = 2'-O-methyl modified nucleotide
  modified_base 11: mod_base = OTHER; note = 2'-O-methyl modified nucleotide
  modified_base 12: mod_base = OTHER; note = 2'-O-methyl modified nucleotide
  modified_base 13: mod_base = OTHER; note = 2'-O-methyl modified nucleotide
  modified_base 14: mod_base = OTHER; note = 2'-fluoro modified nucleotide
  modified_base 15: mod_base = OTHER; note = 2'-O-methyl modified nucleotide
  modified_base 16: mod_base = OTHER; note = 2'-O-methyl modified nucleotide
  modified_base 17: mod_base = OTHER; note = 2'-O-methyl modified nucleotide
  modified_base 18: mod_base = OTHER; note = 2'-O-methyl modified nucleotide
  modified_base 19: mod_base = OTHER; note = 2'-O-methyl modified nucleotide with phosphorothioate linkage
  modified_base 20: mod_base = OTHER; note = 2'-O-methyl modified nucleotide with phosphorothioate linkage
  modified_base 21: mod_base = OTHER; note = 2'-O-methyl modified nucleotide
tagagaactgtgacggccaca

SEQ ID NO: 290 - RNA, 21 nt, synthetic construct
  source 1..21: mol_type = other RNA
  modified_base 1: mod_base = OTHER; note = Vinyl-phosphonate 2'-O-methyl modified nucleotide with phosphorothioate linkage
  modified_base 2: mod_base = OTHER; note = 2'-fluoro modified nucleotide with phosphorothioate linkage
  modified_base 3: mod_base = OTHER; note = 2'-O-methyl modified nucleotide
  modified_base 4: mod_base = OTHER; note = 2'-O-methyl modified nucleotide
  modified_base 5: mod_base = OTHER; note = 2'-O-methyl modified nucleotide
  modified_base 6: mod_base = OTHER; note = 2'-O-methyl modified nucleotide
  modified_base 7: mod_base = OTHER; note = 2'-O-methyl modified nucleotide
  modified_base 8: mod_base = OTHER; note = 2'-O-methyl modified nucleotide
  modified_base 9: mod_base = OTHER; note = 2'-O-methyl modified nucleotide
  modified_base 10: mod_base = OTHER; note = 2'-O-methyl modified nucleotide
  modified_base 11: mod_base = OTHER; note = 2'-O-methyl modified nucleotide
  modified_base 12: mod_base = OTHER; note = 2'-O-methyl modified nucleotide
  modified_base 13: mod_base = OTHER; note = 2'-O-methyl modified nucleotide
  modified_base 14: mod_base = OTHER; note = 2'-fluoro modified nucleotide
  modified_base 15: mod_base = OTHER; note = 2'-O-methyl modified nucleotide
  modified_base 16: mod_base = OTHER; note = 2'-O-methyl modified nucleotide
  modified_base 17: mod_base = OTHER; note = 2'-O-methyl modified nucleotide
  modified_base 18: mod_base = OTHER; note = 2'-O-methyl modified nucleotide
  modified_base 19: mod_base = OTHER; note = 2'-O-methyl modified nucleotide with phosphorothioate linkage
  modified_base 20: mod_base = OTHER; note = 2'-O-methyl modified nucleotide with phosphorothioate linkage
  modified_base 21: mod_base = OTHER; note = 2'-O-methyl modified nucleotide
tagaattgctttgggaccaga

SEQ ID NO: 291 - RNA, 21 nt, synthetic construct
  source 1..21: mol_type = other RNA
  modified_base 1: mod_base = OTHER; note = Vinyl-phosphonate 2'-O-methyl modified nucleotide with phosphorothioate linkage
  modified_base 2: mod_base = OTHER; note = 2'-fluoro modified nucleotide with phosphorothioate linkage
  modified_base 3: mod_base = OTHER; note = 2'-O-methyl modified nucleotide
  modified_base 4: mod_base = OTHER; note = 2'-O-methyl modified nucleotide
  modified_base 5: mod_base = OTHER; note = 2'-O-methyl modified nucleotide
  modified_base 6: mod_base = OTHER; note = 2'-O-methyl modified nucleotide
  modified_base 7: mod_base = OTHER; note = 2'-O-methyl modified nucleotide
  modified_base 8: mod_base = OTHER; note = 2'-O-methyl modified nucleotide
  modified_base 9: mod_base = OTHER; note = 2'-O-methyl modified nucleotide
  modified_base 10: mod_base = OTHER; note = 2'-O-methyl modified nucleotide
  modified_base 11: mod_base = OTHER; note = 2'-O-methyl modified nucleotide
  modified_base 12: mod_base = OTHER; note = 2'-O-methyl modified nucleotide
  modified_base 13: mod_base = OTHER; note = 2'-O-methyl modified nucleotide
  modified_base 14: mod_base = OTHER; note = 2'-fluoro modified nucleotide
  modified_base 15: mod_base = OTHER; note = 2'-O-methyl modified nucleotide
  modified_base 16: mod_base = OTHER; note = 2'-O-methyl modified nucleotide
  modified_base 17: mod_base = OTHER; note = 2'-O-methyl modified nucleotide
  modified_base 18: mod_base = OTHER; note = 2'-O-methyl modified nucleotide
  modified_base 19: mod_base = OTHER; note = 2'-O-methyl modified nucleotide with phosphorothioate linkage
  modified_base 20: mod_base = OTHER; note = 2'-O-methyl modified nucleotide with phosphorothioate linkage
  modified_base 21: mod_base = OTHER; note = 2'-O-methyl modified nucleotide
ttctgatagatgtactggaaa

SEQ ID NO: 292 - RNA, 21 nt, synthetic construct
  source 1..21: mol_type = other RNA
  modified_base 1: mod_base = OTHER; note = Vinyl-phosphonate 2'-O-methyl modified nucleotide with phosphorothioate linkage
  modified_base 2: mod_base = OTHER; note = 2'-fluoro modified nucleotide with phosphorothioate linkage
  modified_base 3: mod_base = OTHER; note = 2'-O-methyl modified nucleotide
  modified_base 4: mod_base = OTHER; note = 2'-O-methyl modified nucleotide
  modified_base 5: mod_base = OTHER; note = 2'-O-methyl modified nucleotide
  modified_base 6: mod_base = OTHER; note = 2'-O-methyl modified nucleotide
  modified_base 7: mod_base = OTHER; note = 2'-O-methyl modified nucleotide
  modified_base 8: mod_base = OTHER; note = 2'-O-methyl modified nucleotide
  modified_base 9: mod_base = OTHER; note = 2'-O-methyl modified nucleotide
  modified_base 10: mod_base = OTHER; note = 2'-O-methyl modified nucleotide
  modified_base 11: mod_base = OTHER; note = 2'-O-methyl modified nucleotide
  modified_base 12: mod_base = OTHER; note = 2'-O-methyl modified nucleotide
  modified_base 13: mod_base = OTHER; note = 2'-O-methyl modified nucleotide
  modified_base 14: mod_base = OTHER; note = 2'-fluoro modified nucleotide
  modified_base 15: mod_base = OTHER; note = 2'-O-methyl modified nucleotide
  modified_base 16: mod_base = OTHER; note = 2'-O-methyl modified nucleotide
  modified_base 17: mod_base = OTHER; note = 2'-O-methyl modified nucleotide
  modified_base 18: mod_base = OTHER; note = 2'-O-methyl modified nucleotide
  modified_base 19: mod_base = OTHER; note = 2'-O-methyl modified nucleotide with phosphorothioate linkage
  modified_base 20: mod_base = OTHER; note = 2'-O-methyl modified nucleotide with phosphorothioate linkage
  modified_base 21: mod_base = OTHER; note = 2'-O-methyl modified nucleotide
tttctgatagatgtactggaa

SEQ ID NO: 293 - RNA, 21 nt, synthetic construct
  source 1..21: mol_type = other RNA
  modified_base 1: mod_base = OTHER; note = Vinyl-phosphonate 2'-O-methyl modified nucleotide with phosphorothioate linkage
  modified_base 2: mod_base = OTHER; note = 2'-fluoro modified nucleotide with phosphorothioate linkage
  modified_base 3: mod_base = OTHER; note = 2'-O-methyl modified nucleotide
  modified_base 4: mod_base = OTHER; note = 2'-O-methyl modified nucleotide
  modified_base 5: mod_base = OTHER; note = 2'-O-methyl modified nucleotide
  modified_base 6: mod_base = OTHER; note = 2'-O-methyl modified nucleotide
  modified_base 7: mod_base = OTHER; note = 2'-O-methyl modified nucleotide
  modified_base 8: mod_base = OTHER; note = 2'-O-methyl modified nucleotide
  modified_base 9: mod_base = OTHER; note = 2'-O-methyl modified nucleotide
  modified_base 10: mod_base = OTHER; note = 2'-O-methyl modified nucleotide
  modified_base 11: mod_base = OTHER; note = 2'-O-methyl modified nucleotide
  modified_base 12: mod_base = OTHER; note = 2'-O-methyl modified nucleotide
  modified_base 13: mod_base = OTHER; note = 2'-O-methyl modified nucleotide
  modified_base 14: mod_base = OTHER; note = 2'-fluoro modified nucleotide
  modified_base 15: mod_base = OTHER; note = 2'-O-methyl modified nucleotide
  modified_base 16: mod_base = OTHER; note = 2'-O-methyl modified nucleotide
  modified_base 17: mod_base = OTHER; note = 2'-O-methyl modified nucleotide
  modified_base 18: mod_base = OTHER; note = 2'-O-methyl modified nucleotide
  modified_base 19: mod_base = OTHER; note = 2'-O-methyl modified nucleotide with phosphorothioate linkage
  modified_base 20: mod_base = OTHER; note = 2'-O-methyl modified nucleotide with phosphorothioate linkage
  modified_base 21: mod_base = OTHER; note = 2'-O-methyl modified nucleotide
tttgatgattctgatagatgt

SEQ ID NO: 294 - RNA, 21 nt, synthetic construct
  source 1..21: mol_type = other RNA
  modified_base 1: mod_base = OTHER; note = Vinyl-phosphonate 2'-O-methyl modified nucleotide with phosphorothioate linkage
  modified_base 2: mod_base = OTHER; note = 2'-fluoro modified nucleotide with phosphorothioate linkage
  modified_base 3: mod_base = OTHER; note = 2'-O-methyl modified nucleotide
  modified_base 4: mod_base = OTHER; note = 2'-O-methyl modified nucleotide
  modified_base 5: mod_base = OTHER; note = 2'-O-methyl modified nucleotide
  modified_base 6: mod_base = OTHER; note = 2'-O-methyl modified nucleotide
  modified_base 7: mod_base = OTHER; note = 2'-O-methyl modified nucleotide
  modified_base 8: mod_base = OTHER; note = 2'-O-methyl modified nucleotide
  modified_base 9: mod_base = OTHER; note = 2'-O-methyl modified nucleotide
  modified_base 10: mod_base = OTHER; note = 2'-O-methyl modified nucleotide
  modified_base 11: mod_base = OTHER; note = 2'-O-methyl modified nucleotide
  modified_base 12: mod_base = OTHER; note = 2'-O-methyl modified nucleotide
  modified_base 13: mod_base = OTHER; note = 2'-O-methyl modified nucleotide
  modified_base 14: mod_base = OTHER; note = 2'-fluoro modified nucleotide
  modified_base 15: mod_base = OTHER; note = 2'-O-methyl modified nucleotide
  modified_base 16: mod_base = OTHER; note = 2'-O-methyl modified nucleotide
  modified_base 17: mod_base = OTHER; note = 2'-O-methyl modified nucleotide
  modified_base 18: mod_base = OTHER; note = 2'-O-methyl modified nucleotide
  modified_base 19: mod_base = OTHER; note = 2'-O-methyl modified nucleotide with phosphorothioate linkage
  modified_base 20: mod_base = OTHER; note = 2'-O-methyl modified nucleotide with phosphorothioate linkage
  modified_base 21: mod_base = OTHER; note = 2'-O-methyl modified nucleotide
ttcaggaattgagtgacttta

SEQ ID NO: 295 - RNA, 21 nt, synthetic construct
  source 1..21: mol_type = other RNA
  modified_base 1: mod_base = OTHER; note = Vinyl-phosphonate 2'-O-methyl modified nucleotide with phosphorothioate linkage
  modified_base 2: mod_base = OTHER; note = 2'-fluoro modified nucleotide with phosphorothioate linkage
  modified_base 3: mod_base = OTHER; note = 2'-O-methyl modified nucleotide
  modified_base 4: mod_base = OTHER; note = 2'-O-methyl modified nucleotide
  modified_base 5: mod_base = OTHER; note = 2'-O-methyl modified nucleotide
  modified_base 6: mod_base = OTHER; note = 2'-O-methyl modified nucleotide
  modified_base 7: mod_base = OTHER; note = 2'-O-methyl modified nucleotide
  modified_base 8: mod_base = OTHER; note = 2'-O-methyl modified nucleotide
  modified_base 9: mod_base = OTHER; note = 2'-O-methyl modified nucleotide
  modified_base 10: mod_base = OTHER; note = 2'-O-methyl modified nucleotide
  modified_base 11: mod_base = OTHER; note = 2'-O-methyl modified nucleotide
  modified_base 12: mod_base = OTHER; note = 2'-O-methyl modified nucleotide
  modified_base 13: mod_base = OTHER; note = 2'-O-methyl modified nucleotide
  modified_base 14: mod_base = OTHER; note = 2'-fluoro modified nucleotide
  modified_base 15: mod_base = OTHER; note = 2'-O-methyl modified nucleotide
  modified_base 16: mod_base = OTHER; note = 2'-O-methyl modified nucleotide
  modified_base 17: mod_base = OTHER; note = 2'-O-methyl modified nucleotide
  modified_base 18: mod_base = OTHER; note = 2'-O-methyl modified nucleotide
  modified_base 19: mod_base = OTHER; note = 2'-O-methyl modified nucleotide with phosphorothioate linkage
  modified_base 20: mod_base = OTHER; note = 2'-O-methyl modified nucleotide with phosphorothioate linkage
  modified_base 21: mod_base = OTHER; note = 2'-O-methyl modified nucleotide
ttatattgattagttcaggaa

SEQ ID NO: 296 - RNA, 21 nt, synthetic construct
  source 1..21: mol_type = other RNA
  modified_base 1: mod_base = OTHER; note = Vinyl-phosphonate 2'-O-methyl modified nucleotide with phosphorothioate linkage
  modified_base 2: mod_base = OTHER; note = 2'-fluoro modified nucleotide with phosphorothioate linkage
  modified_base 3: mod_base = OTHER; note = 2'-O-methyl modified nucleotide
  modified_base 4: mod_base = OTHER; note = 2'-O-methyl modified nucleotide
  modified_base 5: mod_base = OTHER; note = 2'-O-methyl modified nucleotide
  modified_base 6: mod_base = OTHER; note = 2'-O-methyl modified nucleotide
  modified_base 7: mod_base = OTHER; note = 2'-O-methyl modified nucleotide
  modified_base 8: mod_base = OTHER; note = 2'-O-methyl modified nucleotide
  modified_base 9: mod_base = OTHER; note = 2'-O-methyl modified nucleotide
  modified_base 10: mod_base = OTHER; note = 2'-O-methyl modified nucleotide
  modified_base 11: mod_base = OTHER; note = 2'-O-methyl modified nucleotide
  modified_base 12: mod_base = OTHER; note = 2'-O-methyl modified nucleotide
  modified_base 13: mod_base = OTHER; note = 2'-O-methyl modified nucleotide
  modified_base 14: mod_base = OTHER; note = 2'-fluoro modified nucleotide
  modified_base 15: mod_base = OTHER; note = 2'-O-methyl modified nucleotide
  modified_base 16: mod_base = OTHER; note = 2'-O-methyl modified nucleotide
  modified_base 17: mod_base = OTHER; note = 2'-O-methyl modified nucleotide
  modified_base 18: mod_base = OTHER; note = 2'-O-methyl modified nucleotide
  modified_base 19: mod_base = OTHER; note = 2'-O-methyl modified nucleotide with phosphorothioate linkage
  modified_base 20: mod_base = OTHER; note = 2'-O-methyl modified nucleotide with phosphorothioate linkage
  modified_base 21: mod_base = OTHER; note = 2'-O-methyl modified nucleotide
ttatatattgattagttcagg

SEQ ID NO: 297 - RNA, 21 nt, synthetic construct
  source 1..21: mol_type = other RNA
  modified_base 1: mod_base = OTHER; note = Vinyl-phosphonate 2'-O-methyl modified nucleotide with phosphorothioate linkage
  modified_base 2: mod_base = OTHER; note = 2'-fluoro modified nucleotide with phosphorothioate linkage
  modified_base 3: mod_base = OTHER; note = 2'-O-methyl modified nucleotide
  modified_base 4: mod_base = OTHER; note = 2'-O-methyl modified nucleotide
  modified_base 5: mod_base = OTHER; note = 2'-O-methyl modified nucleotide
  modified_base 6: mod_base = OTHER; note = 2'-O-methyl modified nucleotide
  modified_base 7: mod_base = OTHER; note = 2'-O-methyl modified nucleotide
  modified_base 8: mod_base = OTHER; note = 2'-O-methyl modified nucleotide
  modified_base 9: mod_base = OTHER; note = 2'-O-methyl modified nucleotide
  modified_base 10: mod_base = OTHER; note = 2'-O-methyl modified nucleotide
  modified_base 11: mod_base = OTHER; note = 2'-O-methyl modified nucleotide
  modified_base 12: mod_base = OTHER; note = 2'-O-methyl modified nucleotide
  modified_base 13: mod_base = OTHER; note = 2'-O-methyl modified nucleotide
  modified_base 14: mod_base = OTHER; note = 2'-fluoro modified nucleotide
  modified_base 15: mod_base = OTHER; note = 2'-O-methyl modified nucleotide
  modified_base 16: mod_base = OTHER; note = 2'-O-methyl modified nucleotide
  modified_base 17: mod_base = OTHER; note = 2'-O-methyl modified nucleotide
  modified_base 18: mod_base = OTHER; note = 2'-O-methyl modified nucleotide
  modified_base 19: mod_base = OTHER; note = 2'-O-methyl modified nucleotide with phosphorothioate linkage
  modified_base 20: mod_base = OTHER; note = 2'-O-methyl modified nucleotide with phosphorothioate linkage
  modified_base 21: mod_base = OTHER; note = 2'-O-methyl modified nucleotide
ttgcaaggaatgagaaccagg

SEQ ID NO: 298 - RNA, 21 nt, synthetic construct
  source 1..21: mol_type = other RNA
  modified_base 1: mod_base = OTHER; note = Vinyl-phosphonate 2'-O-methyl modified nucleotide with phosphorothioate linkage
  modified_base 2: mod_base = OTHER; note = 2'-fluoro modified nucleotide with phosphorothioate linkage
  modified_base 3: mod_base = OTHER; note = 2'-O-methyl modified nucleotide
  modified_base 4: mod_base = OTHER; note = 2'-O-methyl modified nucleotide
  modified_base 5: mod_base = OTHER; note = 2'-O-methyl modified nucleotide
  modified_base 6: mod_base = OTHER; note = 2'-O-methyl modified nucleotide
  modified_base 7: mod_base = OTHER; note = 2'-O-methyl modified nucleotide
  modified_base 8: mod_base = OTHER; note = 2'-O-methyl modified nucleotide
  modified_base 9: mod_base = OTHER; note = 2'-O-methyl modified nucleotide
  modified_base 10: mod_base = OTHER; note = 2'-O-methyl modified nucleotide
  modified_base 11: mod_base = OTHER; note = 2'-O-methyl modified nucleotide
  modified_base 12: mod_base = OTHER; note = 2'-O-methyl modified nucleotide
  modified_base 13: mod_base = OTHER; note = 2'-O-methyl modified nucleotide
  modified_base 14: mod_base = OTHER; note = 2'-fluoro modified nucleotide
  modified_base 15: mod_base = OTHER; note = 2'-O-methyl modified nucleotide
  modified_base 16: mod_base = OTHER; note = 2'-O-methyl modified nucleotide
  modified_base 17: mod_base = OTHER; note = 2'-O-methyl modified nucleotide
  modified_base 18: mod_base = OTHER; note = 2'-O-methyl modified nucleotide
  modified_base 19: mod_base = OTHER; note = 2'-O-methyl modified nucleotide with phosphorothioate linkage
  modified_base 20: mod_base = OTHER; note = 2'-O-methyl modified nucleotide with phosphorothioate linkage
  modified_base 21: mod_base = OTHER; note = 2'-O-methyl modified nucleotide
ttatggtgcaaggaatgagaa

SEQ ID NO: 299 - RNA, 21 nt, synthetic construct
  source 1..21: mol_type = other RNA
  modified_base 1: mod_base = OTHER; note = Vinyl-phosphonate 2'-O-methyl modified nucleotide with phosphorothioate linkage
  modified_base 2: mod_base = OTHER; note = 2'-fluoro modified nucleotide with phosphorothioate linkage
  modified_base 3: mod_base = OTHER; note = 2'-O-methyl modified nucleotide
  modified_base 4: mod_base = OTHER; note = 2'-O-methyl modified nucleotide
  modified_base 5: mod_base = OTHER; note = 2'-O-methyl modified nucleotide
  modified_base 6: mod_base = OTHER; note = 2'-O-methyl modified nucleotide
  modified_base 7: mod_base = OTHER; note = 2'-O-methyl modified nucleotide
  modified_base 8: mod_base = OTHER; note = 2'-O-methyl modified nucleotide
  modified_base 9: mod_base = OTHER; note = 2'-O-methyl modified nucleotide
  modified_base 10: mod_base = OTHER; note = 2'-O-methyl modified nucleotide
  modified_base 11: mod_base = OTHER; note = 2'-O-methyl modified nucleotide
  modified_base 12: mod_base = OTHER; note = 2'-O-methyl modified nucleotide
  modified_base 13: mod_base = OTHER; note = 2'-O-methyl modified nucleotide
  modified_base 14: mod_base = OTHER; note = 2'-fluoro modified nucleotide
  modified_base 15: mod_base = OTHER; note = 2'-O-methyl modified nucleotide
  modified_base 16: mod_base = OTHER; note = 2'-O-methyl modified nucleotide
  modified_base 17: mod_base = OTHER; note = 2'-O-methyl modified nucleotide
  modified_base 18: mod_base = OTHER; note = 2'-O-methyl modified nucleotide
  modified_base 19: mod_base = OTHER; note = 2'-O-methyl modified nucleotide with phosphorothioate linkage
  modified_base 20: mod_base = OTHER; note = 2'-O-methyl modified nucleotide with phosphorothioate linkage
  modified_base 21: mod_base = OTHER; note = 2'-O-methyl modified nucleotide
taacccagcagaaagccaata

SEQ ID NO: 300 - RNA, 21 nt, synthetic construct
  source 1..21: mol_type = other RNA
  modified_base 1: mod_base = OTHER; note = Vinyl-phosphonate 2'-O-methyl modified nucleotide with phosphorothioate linkage
  modified_base 2: mod_base = OTHER; note = 2'-fluoro modified nucleotide with phosphorothioate linkage
  modified_base 3: mod_base = OTHER; note = 2'-O-methyl modified nucleotide
  modified_base 4: mod_base = OTHER; note = 2'-O-methyl modified nucleotide
  modified_base 5: mod_base = OTHER; note = 2'-O-methyl modified nucleotide
  modified_base 6: mod_base = OTHER; note = 2'-O-methyl modified nucleotide
  modified_base 7: mod_base = OTHER; note = 2'-O-methyl modified nucleotide
  modified_base 8: mod_base = OTHER; note = 2'-O-methyl modified nucleotide
  modified_base 9: mod_base = OTHER; note = 2'-O-methyl modified nucleotide
  modified_base 10: mod_base = OTHER; note = 2'-O-methyl modified nucleotide
  modified_base 11: mod_base = OTHER; note = 2'-O-methyl modified nucleotide
  modified_base 12: mod_base = OTHER; note = 2'-O-methyl modified nucleotide
  modified_base 13: mod_base = OTHER; note = 2'-O-methyl modified nucleotide
  modified_base 14: mod_base = OTHER; note = 2'-fluoro modified nucleotide
  modified_base 15: mod_base = OTHER; note = 2'-O-methyl modified nucleotide
  modified_base 16: mod_base = OTHER; note = 2'-O-methyl modified nucleotide
  modified_base 17: mod_base = OTHER; note = 2'-O-methyl modified nucleotide
  modified_base 18: mod_base = OTHER; note = 2'-O-methyl modified nucleotide
  modified_base 19: mod_base = OTHER; note = 2'-O-methyl modified nucleotide with phosphorothioate linkage
  modified_base 20: mod_base = OTHER; note = 2'-O-methyl modified nucleotide with phosphorothioate linkage
  modified_base 21: mod_base = OTHER; note = 2'-O-methyl modified nucleotide
tggaaaatcatgtagaggagg

SEQ ID NO: 301 - RNA, 21 nt, synthetic construct
  source 1..21: mol_type = other RNA
  modified_base 1: mod_base = OTHER; note = Vinyl-phosphonate 2'-O-methyl modified nucleotide with phosphorothioate linkage
  modified_base 2: mod_base = OTHER; note = 2'-fluoro modified nucleotide with phosphorothioate linkage
  modified_base 3: mod_base = OTHER; note = 2'-O-methyl modified nucleotide
  modified_base 4: mod_base = OTHER; note = 2'-O-methyl modified nucleotide
  modified_base 5: mod_base = OTHER; note = 2'-O-methyl modified nucleotide
  modified_base 6: mod_base = OTHER; note = 2'-fluoro modified nucleotide
  modified_base 7: mod_base = OTHER; note = 2'-O-methyl modified nucleotide
  modified_base 8: mod_base = OTHER; note = 2'-fluoro modified nucleotide
  modified_base 9: mod_base = OTHER; note = 2'-fluoro modified nucleotide
  modified_base 10: mod_base = OTHER; note = 2'-O-methyl modified nucleotide
  modified_base 11: mod_base = OTHER; note = 2'-O-methyl modified nucleotide
  modified_base 12: mod_base = OTHER; note = 2'-O-methyl modified nucleotide
  modified_base 13: mod_base = OTHER; note = 2'-O-methyl modified nucleotide
  modified_base 14: mod_base = OTHER; note = 2'-fluoro modified nucleotide
  modified_base 15: mod_base = OTHER; note = 2'-O-methyl modified nucleotide
  modified_base 16: mod_base = OTHER; note = 2'-fluoro modified nucleotide
  modified_base 17: mod_base = OTHER; note = 2'-O-methyl modified nucleotide
  modified_base 18: mod_base = OTHER; note = 2'-O-methyl modified nucleotide
  modified_base 19: mod_base = OTHER; note = 2'-O-methyl modified nucleotide with phosphorothioate linkage
  modified_base 20: mod_base = OTHER; note = 2'-O-methyl modified nucleotide with phosphorothioate linkage
  modified_base 21: mod_base = OTHER; note = 2'-O-methyl modified nucleotide
tataagtgagccttgatcttg

SEQ ID NO: 302 - RNA, 21 nt, synthetic construct
  source 1..21: mol_type = other RNA
  modified_base 1: mod_base = OTHER; note = Vinyl-phosphonate 2'-O-methyl modified nucleotide with phosphorothioate linkage
  modified_base 2: mod_base = OTHER; note = 2'-fluoro modified nucleotide with phosphorothioate linkage
  modified_base 3: mod_base = OTHER; note = 2'-O-methyl modified nucleotide
  modified_base 4: mod_base = OTHER; note = 2'-O-methyl modified nucleotide
  modified_base 5: mod_base = OTHER; note = 2'-O-methyl modified nucleotide
  modified_base 6: mod_base = OTHER; note = 2'-fluoro modified nucleotide
  modified_base 7: mod_base = OTHER; note = 2'-O-methyl modified nucleotide
  modified_base 8: mod_base = OTHER; note = 2'-fluoro modified nucleotide
  modified_base 9: mod_base = OTHER; note = 2'-fluoro modified nucleotide
  modified_base 10: mod_base = OTHER; note = 2'-O-methyl modified nucleotide
  modified_base 11: mod_base = OTHER; note = 2'-O-methyl modified nucleotide
  modified_base 12: mod_base = OTHER; note = 2'-O-methyl modified nucleotide
  modified_base 13: mod_base = OTHER; note = 2'-O-methyl modified nucleotide
  modified_base 14: mod_base = OTHER; note = 2'-fluoro modified nucleotide
  modified_base 15: mod_base = OTHER; note = 2'-O-methyl modified nucleotide
  modified_base 16: mod_base = OTHER; note = 2'-fluoro modified nucleotide
  modified_base 17: mod_base = OTHER; note = 2'-O-methyl modified nucleotide
  modified_base 18: mod_base = OTHER; note = 2'-O-methyl modified nucleotide
  modified_base 19: mod_base = OTHER; note = 2'-O-methyl modified nucleotide with phosphorothioate linkage
  modified_base 20: mod_base = OTHER; note = 2'-O-methyl modified nucleotide with phosphorothioate linkage
  modified_base 21: mod_base = OTHER; note = 2'-O-methyl modified nucleotide
ttggtcatcacaatgctgagg

SEQ ID NO: 303 - RNA, 21 nt, synthetic construct
  source 1..21: mol_type = other RNA
  modified_base 1: mod_base = OTHER; note = Vinyl-phosphonate 2'-O-methyl modified nucleotide with phosphorothioate linkage
  modified_base 2: mod_base = OTHER; note = 2'-fluoro modified nucleotide with phosphorothioate linkage
  modified_base 3: mod_base = OTHER; note = 2'-O-methyl modified nucleotide
  modified_base 4: mod_base = OTHER; note = 2'-O-methyl modified nucleotide
  modified_base 5: mod_base = OTHER; note = 2'-O-methyl modified nucleotide
  modified_base 6: mod_base = OTHER; note = 2'-fluoro modified nucleotide
  modified_base 7: mod_base = OTHER; note = 2'-O-methyl modified nucleotide
  modified_base 8: mod_base = OTHER; note = 2'-fluoro modified nucleotide
  modified_base 9: mod_base = OTHER; note = 2'-fluoro modified nucleotide
  modified_base 10: mod_base = OTHER; note = 2'-O-methyl modified nucleotide
  modified_base 11: mod_base = OTHER; note = 2'-O-methyl modified nucleotide
  modified_base 12: mod_base = OTHER; note = 2'-O-methyl modified nucleotide
  modified_base 13: mod_base = OTHER; note = 2'-O-methyl modified nucleotide
  modified_base 14: mod_base = OTHER; note = 2'-fluoro modified nucleotide
  modified_base 15: mod_base = OTHER; note = 2'-O-methyl modified nucleotide
  modified_base 16: mod_base = OTHER; note = 2'-fluoro modified nucleotide
  modified_base 17: mod_base = OTHER; note = 2'-O-methyl modified nucleotide
  modified_base 18: mod_base = OTHER; note = 2'-O-methyl modified nucleotide
  modified_base 19: mod_base = OTHER; note = 2'-O-methyl modified nucleotide with phosphorothioate linkage
  modified_base 20: mod_base = OTHER; note = 2'-O-methyl modified nucleotide with phosphorothioate linkage
  modified_base 21: mod_base = OTHER; note = 2'-O-methyl modified nucleotide
ttgcacaagagaatgatgatc

SEQ ID NO: 304 - RNA, 21 nt, synthetic construct
  source 1..21: mol_type = other RNA
  modified_base 1: mod_base = OTHER; note = Vinyl-phosphonate 2'-O-methyl modified nucleotide with phosphorothioate linkage
  modified_base 2: mod_base = OTHER; note = 2'-fluoro modified nucleotide with phosphorothioate linkage
  modified_base 3: mod_base = OTHER; note = 2'-O-methyl modified nucleotide
  modified_base 4: mod_base = OTHER; note = 2'-O-methyl modified nucleotide
  modified_base 5: mod_base = OTHER; note = 2'-O-methyl modified nucleotide
  modified_base 6: mod_base = OTHER; note = 2'-fluoro modified nucleotide
  modified_base 7: mod_base = OTHER; note = 2'-O-methyl modified nucleotide
  modified_base 8: mod_base = OTHER; note = 2'-fluoro modified nucleotide
  modified_base 9: mod_base = OTHER; note = 2'-fluoro modified nucleotide
  modified_base 10: mod_base = OTHER; note = 2'-O-methyl modified nucleotide
  modified_base 11: mod_base = OTHER; note = 2'-O-methyl modified nucleotide
  modified_base 12: mod_base = OTHER; note = 2'-O-methyl modified nucleotide
  modified_base 13: mod_base = OTHER; note = 2'-O-methyl modified nucleotide
  modified_base 14: mod_base = OTHER; note = 2'-fluoro modified nucleotide
  modified_base 15: mod_base = OTHER; note = 2'-O-methyl modified nucleotide
  modified_base 16: mod_base = OTHER; note = 2'-fluoro modified nucleotide
  modified_base 17: mod_base = OTHER; note = 2'-O-methyl modified nucleotide
  modified_base 18: mod_base = OTHER; note = 2'-O-methyl modified nucleotide
  modified_base 19: mod_base = OTHER; note = 2'-O-methyl modified nucleotide with phosphorothioate linkage
  modified_base 20: mod_base = OTHER; note = 2'-O-methyl modified nucleotide with phosphorothioate linkage
  modified_base 21: mod_base = OTHER; note = 2'-O-methyl modified nucleotide
tagagaactgtgacggccaca

SEQ ID NO: 305 - RNA, 21 nt, synthetic construct
  source 1..21: mol_type = other RNA
  modified_base 1: mod_base = OTHER; note = Vinyl-phosphonate 2'-O-methyl modified nucleotide with phosphorothioate linkage
  modified_base 2: mod_base = OTHER; note = 2'-fluoro modified nucleotide with phosphorothioate linkage
  modified_base 3: mod_base = OTHER; note = 2'-O-methyl modified nucleotide
  modified_base 4: mod_base = OTHER; note = 2'-O-methyl modified nucleotide
  modified_base 5: mod_base = OTHER; note = 2'-O-methyl modified nucleotide
  modified_base 6: mod_base = OTHER; note = 2'-fluoro modified nucleotide
  modified_base 7: mod_base = OTHER; note = 2'-O-methyl modified nucleotide
  modified_base 8: mod_base = OTHER; note = 2'-fluoro modified nucleotide
  modified_base 9: mod_base = OTHER; note = 2'-fluoro modified nucleotide
  modified_base 10: mod_base = OTHER; note = 2'-O-methyl modified nucleotide
  modified_base 11: mod_base = OTHER; note = 2'-O-methyl modified nucleotide
  modified_base 12: mod_base = OTHER; note = 2'-O-methyl modified nucleotide
  modified_base 13: mod_base = OTHER; note = 2'-O-methyl modified nucleotide
  modified_base 14: mod_base = OTHER; note = 2'-fluoro modified nucleotide
  modified_base 15: mod_base = OTHER; note = 2'-O-methyl modified nucleotide
  modified_base 16: mod_base = OTHER; note = 2'-fluoro modified nucleotide
  modified_base 17: mod_base = OTHER; note = 2'-O-methyl modified nucleotide
  modified_base 18: mod_base = OTHER; note = 2'-O-methyl modified nucleotide
  modified_base 19: mod_base = OTHER; note = 2'-O-methyl modified nucleotide with phosphorothioate linkage
  modified_base 20: mod_base = OTHER; note = 2'-O-methyl modified nucleotide with phosphorothioate linkage
  modified_base 21: mod_base = OTHER; note = 2'-O-methyl modified nucleotide
tagaattgctttgggaccaga

SEQ ID NO: 306 - RNA, 21 nt, synthetic construct
  source 1..21: mol_type = other RNA
  modified_base 1: mod_base = OTHER; note = Vinyl-phosphonate 2'-O-methyl modified nucleotide with phosphorothioate linkage
  modified_base 2: mod_base = OTHER; note = 2'-fluoro modified nucleotide with phosphorothioate linkage
  modified_base 3: mod_base = OTHER; note = 2'-O-methyl modified nucleotide
  modified_base 4: mod_base = OTHER; note = 2'-O-methyl modified nucleotide
  modified_base 5: mod_base = OTHER; note = 2'-O-methyl modified nucleotide
  modified_base 6: mod_base = OTHER; note = 2'-fluoro modified nucleotide
  modified_base 7: mod_base = OTHER; note = 2'-O-methyl modified nucleotide
  modified_base 8: mod_base = OTHER; note = 2'-fluoro modified nucleotide
  modified_base 9: mod_base = OTHER; note = 2'-fluoro modified nucleotide
  modified_base 10: mod_base = OTHER; note = 2'-O-methyl modified nucleotide
  modified_base 11: mod_base = OTHER; note = 2'-O-methyl modified nucleotide
  modified_base 12: mod_base = OTHER; note = 2'-O-methyl modified nucleotide
  modified_base 13: mod_base = OTHER; note = 2'-O-methyl modified nucleotide
  modified_base 14: mod_base = OTHER; note = 2'-fluoro modified nucleotide
  modified_base 15: mod_base = OTHER; note = 2'-O-methyl modified nucleotide
  modified_base 16: mod_base = OTHER; note = 2'-fluoro modified nucleotide
  modified_base 17: mod_base = OTHER; note = 2'-O-methyl modified nucleotide
  modified_base 18: mod_base = OTHER; note = 2'-O-methyl modified nucleotide
  modified_base 19: mod_base = OTHER; note = 2'-O-methyl modified nucleotide with phosphorothioate linkage
  modified_base 20: mod_base = OTHER; note = 2'-O-methyl modified nucleotide with phosphorothioate linkage
  modified_base 21: mod_base = OTHER; note = 2'-O-methyl modified nucleotide
ttctgatagatgtactggaaa

SEQ ID NO: 307 - RNA, 21 nt, synthetic construct
  source 1..21: mol_type = other RNA
  modified_base 1: mod_base = OTHER; note = Vinyl-phosphonate 2'-O-methyl modified nucleotide with phosphorothioate linkage
  modified_base 2: mod_base = OTHER; note = 2'-fluoro modified nucleotide with phosphorothioate linkage
  modified_base 3: mod_base = OTHER; note = 2'-O-methyl modified nucleotide
  modified_base 4: mod_base = OTHER; note = 2'-O-methyl modified nucleotide
  modified_base 5: mod_base = OTHER; note = 2'-O-methyl modified nucleotide
  modified_base 6: mod_base = OTHER; note = 2'-fluoro modified nucleotide
  modified_base 7: mod_base = OTHER; note = 2'-O-methyl modified nucleotide
  modified_base 8: mod_base = OTHER; note = 2'-fluoro modified nucleotide
  modified_base 9: mod_base = OTHER; note = 2'-fluoro modified nucleotide
  modified_base 10: mod_base = OTHER; note = 2'-O-methyl modified nucleotide
  modified_base 11: mod_base = OTHER; note = 2'-O-methyl modified nucleotide
  modified_base 12: mod_base = OTHER; note = 2'-O-methyl modified nucleotide
  modified_base 13: mod_base = OTHER; note = 2'-O-methyl modified nucleotide
  modified_base 14: mod_base = OTHER; note = 2'-fluoro modified nucleotide
  modified_base 15: mod_base = OTHER; note = 2'-O-methyl modified nucleotide
  modified_base 16: mod_base = OTHER; note = 2'-fluoro modified nucleotide
  modified_base 17: mod_base = OTHER; note = 2'-O-methyl modified nucleotide
  modified_base 18: mod_base = OTHER; note = 2'-O-methyl modified nucleotide
  modified_base 19: mod_base = OTHER; note = 2'-O-methyl modified nucleotide with phosphorothioate linkage
  modified_base 20: mod_base = OTHER; note = 2'-O-methyl modified nucleotide with phosphorothioate linkage
  modified_base 21: mod_base = OTHER; note = 2'-O-methyl modified nucleotide
tttctgatagatgtactggaa

SEQ ID NO: 308 - RNA, 21 nt, synthetic construct
  source 1..21: mol_type = other RNA
  modified_base 1: mod_base = OTHER; note = Vinyl-phosphonate 2'-O-methyl modified nucleotide with phosphorothioate linkage
  modified_base 2: mod_base = OTHER; note = 2'-fluoro modified nucleotide with phosphorothioate linkage
  modified_base 3: mod_base = OTHER; note = 2'-O-methyl modified nucleotide
  modified_base 4: mod_base = OTHER; note = 2'-O-methyl modified nucleotide
  modified_base 5: mod_base = OTHER; note = 2'-O-methyl modified nucleotide
  modified_base 6: mod_base = OTHER; note = 2'-fluoro modified nucleotide
  modified_base 7: mod_base = OTHER; note = 2'-O-methyl modified nucleotide
  modified_base 8: mod_base = OTHER; note = 2'-fluoro modified nucleotide
  modified_base 9: mod_base = OTHER; note = 2'-fluoro modified nucleotide
  modified_base 10: mod_base = OTHER; note = 2'-O-methyl modified nucleotide
  modified_base 11: mod_base = OTHER; note = 2'-O-methyl modified nucleotide
  modified_base 12: mod_base = OTHER; note = 2'-O-methyl modified nucleotide
  modified_base 13: mod_base = OTHER; note = 2'-O-methyl modified nucleotide
  modified_base 14: mod_base = OTHER; note = 2'-fluoro modified nucleotide
  modified_base 15: mod_base = OTHER; note = 2'-O-methyl modified nucleotide
  modified_base 16: mod_base = OTHER; note = 2'-fluoro modified nucleotide
  modified_base 17: mod_base = OTHER; note = 2'-O-methyl modified nucleotide
  modified_base 18: mod_base = OTHER; note = 2'-O-methyl modified nucleotide
  modified_base 19: mod_base = OTHER; note = 2'-O-methyl modified nucleotide with phosphorothioate linkage
  modified_base 20: mod_base = OTHER; note = 2'-O-methyl modified nucleotide with phosphorothioate linkage
  modified_base 21: mod_base = OTHER; note = 2'-O-methyl modified nucleotide
tttgatgattctgatagatgt

SEQ ID NO: 309 - RNA, 21 nt, synthetic construct
  source 1..21: mol_type = other RNA
  modified_base 1: mod_base = OTHER; note = Vinyl-phosphonate 2'-O-methyl modified nucleotide with phosphorothioate linkage
  modified_base 2: mod_base = OTHER; note = 2'-fluoro modified nucleotide with phosphorothioate linkage
  modified_base 3: mod_base = OTHER; note = 2'-O-methyl modified nucleotide
  modified_base 4: mod_base = OTHER; note = 2'-O-methyl modified nucleotide
  modified_base 5: mod_base = OTHER; note = 2'-O-methyl modified nucleotide
  modified_base 6: mod_base = OTHER; note = 2'-fluoro modified nucleotide
  modified_base 7: mod_base = OTHER; note = 2'-O-methyl modified nucleotide
  modified_base 8: mod_base = OTHER; note = 2'-fluoro modified nucleotide
  modified_base 9: mod_base = OTHER; note = 2'-fluoro modified nucleotide
  modified_base 10: mod_base = OTHER; note = 2'-O-methyl modified nucleotide
  modified_base 11: mod_base = OTHER; note = 2'-O-methyl modified nucleotide
  modified_base 12: mod_base = OTHER; note = 2'-O-methyl modified nucleotide
  modified_base 13: mod_base = OTHER; note = 2'-O-methyl modified nucleotide
  modified_base 14: mod_base = OTHER; note = 2'-fluoro modified nucleotide
  modified_base 15: mod_base = OTHER; note = 2'-O-methyl modified nucleotide
  modified_base 16: mod_base = OTHER; note = 2'-fluoro modified nucleotide
  modified_base 17: mod_base = OTHER; note = 2'-O-methyl modified nucleotide
  modified_base 18: mod_base = OTHER; note = 2'-O-methyl modified nucleotide
  modified_base 19: mod_base = OTHER; note = 2'-O-methyl modified nucleotide with phosphorothioate linkage
  modified_base 20: mod_base = OTHER; note = 2'-O-methyl modified nucleotide with phosphorothioate linkage
  modified_base 21: mod_base = OTHER; note = 2'-O-methyl modified nucleotide
ttcaggaattgagtgacttta

SEQ ID NO: 310 - RNA, 21 nt, synthetic construct
  source 1..21: mol_type = other RNA
  modified_base 1: mod_base = OTHER; note = Vinyl-phosphonate 2'-O-methyl modified nucleotide with phosphorothioate linkage
  modified_base 2: mod_base = OTHER; note = 2'-fluoro modified nucleotide with phosphorothioate linkage
  modified_base 3: mod_base = OTHER; note = 2'-O-methyl modified nucleotide
  modified_base 4: mod_base = OTHER; note = 2'-O-methyl modified nucleotide
  modified_base 5: mod_base = OTHER; note = 2'-O-methyl modified nucleotide
  modified_base 6: mod_base = OTHER; note = 2'-fluoro modified nucleotide
  modified_base 7: mod_base = OTHER; note = 2'-O-methyl modified nucleotide
  modified_base 8: mod_base = OTHER; note = 2'-fluoro modified nucleotide
  modified_base 9: mod_base = OTHER; note = 2'-fluoro modified nucleotide
  modified_base 10: mod_base = OTHER; note = 2'-O-methyl modified nucleotide
  modified_base 11: mod_base = OTHER; note = 2'-O-methyl modified nucleotide
  modified_base 12: mod_base = OTHER; note = 2'-O-methyl modified nucleotide
  modified_base 13: mod_base = OTHER; note = 2'-O-methyl modified nucleotide
  modified_base 14: mod_base = OTHER; note = 2'-fluoro modified nucleotide
  modified_base 15: mod_base = OTHER; note = 2'-O-methyl modified nucleotide
  modified_base 16: mod_base = OTHER; note = 2'-fluoro modified nucleotide
  modified_base 17: mod_base = OTHER; note = 2'-O-methyl modified nucleotide
  modified_base 18: mod_base = OTHER; note = 2'-O-methyl modified nucleotide
  modified_base 19: mod_base = OTHER; note = 2'-O-methyl modified nucleotide with phosphorothioate linkage
  modified_base 20: mod_base = OTHER; note = 2'-O-methyl modified nucleotide with phosphorothioate linkage
  modified_base 21: mod_base = OTHER; note = 2'-O-methyl modified nucleotide
ttatattgattagttcaggaa

SEQ ID NO: 311 - RNA, 21 nt, synthetic construct
  source 1..21: mol_type = other RNA
  modified_base 1: mod_base = OTHER; note = Vinyl-phosphonate 2'-O-methyl modified nucleotide with phosphorothioate linkage
  modified_base 2: mod_base = OTHER; note = 2'-fluoro modified nucleotide with phosphorothioate linkage
  modified_base 3: mod_base = OTHER; note = 2'-O-methyl modified nucleotide
  modified_base 4: mod_base = OTHER; note = 2'-O-methyl modified nucleotide
  modified_base 5: mod_base = OTHER; note = 2'-O-methyl modified nucleotide
  modified_base 6: mod_base = OTHER; note = 2'-fluoro modified nucleotide
  modified_base 7: mod_base = OTHER; note = 2'-O-methyl modified nucleotide
  modified_base 8: mod_base = OTHER; note = 2'-fluoro modified nucleotide
  modified_base 9: mod_base = OTHER; note = 2'-fluoro modified nucleotide
  modified_base 10: mod_base = OTHER; note = 2'-O-methyl modified nucleotide
  modified_base 11: mod_base = OTHER; note = 2'-O-methyl modified nucleotide
  modified_base 12: mod_base = OTHER; note = 2'-O-methyl modified nucleotide
  modified_base 13: mod_base = OTHER; note = 2'-O-methyl modified nucleotide
  modified_base 14: mod_base = OTHER; note = 2'-fluoro modified nucleotide
  modified_base 15: mod_base = OTHER; note = 2'-O-methyl modified nucleotide
  modified_base 16: mod_base = OTHER; note = 2'-fluoro modified nucleotide
  modified_base 17: mod_base = OTHER; note = 2'-O-methyl modified nucleotide
  modified_base 18: mod_base = OTHER; note = 2'-O-methyl modified nucleotide
  modified_base 19: mod_base = OTHER; note = 2'-O-methyl modified nucleotide with phosphorothioate linkage
  modified_base 20: mod_base = OTHER; note = 2'-O-methyl modified nucleotide with phosphorothioate linkage
  modified_base 21: mod_base = OTHER; note = 2'-O-methyl modified nucleotide
ttatatattgattagttcagg

SEQ ID NO: 312 - RNA, 21 nt, synthetic construct
  source 1..21: mol_type = other RNA
  modified_base 1: mod_base = OTHER; note = Vinyl-phosphonate 2'-O-methyl modified nucleotide with phosphorothioate linkage
  modified_base 2: mod_base = OTHER; note = 2'-fluoro modified nucleotide with phosphorothioate linkage
  modified_base 3: mod_base = OTHER; note = 2'-O-methyl modified nucleotide
  modified_base 4: mod_base = OTHER; note = 2'-O-methyl modified nucleotide
  modified_base 5: mod_base = OTHER; note = 2'-O-methyl modified nucleotide
  modified_base 6: mod_base = OTHER; note = 2'-fluoro modified nucleotide
  modified_base 7: mod_base = OTHER; note = 2'-O-methyl modified nucleotide
  modified_base 8: mod_base = OTHER; note = 2'-fluoro modified nucleotide
  modified_base 9: mod_base = OTHER; note = 2'-fluoro modified nucleotide
  modified_base 10: mod_base = OTHER; note = 2'-O-methyl modified nucleotide
  modified_base 11: mod_base = OTHER; note = 2'-O-methyl modified nucleotide
  modified_base 12: mod_base = OTHER; note = 2'-O-methyl modified nucleotide
  modified_base 13: mod_base = OTHER; note = 2'-O-methyl modified nucleotide
  modified_base 14: mod_base = OTHER; note = 2'-fluoro modified nucleotide
  modified_base 15: mod_base = OTHER; note = 2'-O-methyl modified nucleotide
  modified_base 16: mod_base = OTHER; note = 2'-fluoro modified nucleotide
  modified_base 17: mod_base = OTHER; note = 2'-O-methyl modified nucleotide
  modified_base 18: mod_base = OTHER; note = 2'-O-methyl modified nucleotide
  modified_base 19: mod_base = OTHER; note = 2'-O-methyl modified nucleotide with phosphorothioate linkage
  modified_base 20: mod_base = OTHER; note = 2'-O-methyl modified nucleotide with phosphorothioate linkage
  modified_base 21: mod_base = OTHER; note = 2'-O-methyl modified nucleotide
ttgcaaggaatgagaaccagg

SEQ ID NO: 313 - RNA, 21 nt, synthetic construct
  source 1..21: mol_type = other RNA
  modified_base 1: mod_base = OTHER; note = Vinyl-phosphonate 2'-O-methyl modified nucleotide with phosphorothioate linkage
  modified_base 2: mod_base = OTHER; note = 2'-fluoro modified nucleotide with phosphorothioate linkage
  modified_base 3: mod_base = OTHER; note = 2'-O-methyl modified nucleotide
  modified_base 4: mod_base = OTHER; note = 2'-O-methyl modified nucleotide
  modified_base 5: mod_base = OTHER; note = 2'-O-methyl modified nucleotide
  modified_base 6: mod_base = OTHER; note = 2'-fluoro modified nucleotide
  modified_base 7: mod_base = OTHER; note = 2'-O-methyl modified nucleotide
  modified_base 8: mod_base = OTHER; note = 2'-fluoro modified nucleotide
  modified_base 9: mod_base = OTHER; note = 2'-fluoro modified nucleotide
  modified_base 10: mod_base = OTHER; note = 2'-O-methyl modified nucleotide
  modified_base 11: mod_base = OTHER; note = 2'-O-methyl modified nucleotide
  modified_base 12: mod_base = OTHER; note = 2'-O-methyl modified nucleotide
  modified_base 13: mod_base = OTHER; note = 2'-O-methyl modified nucleotide
  modified_base 14: mod_base = OTHER; note = 2'-fluoro modified nucleotide
  modified_base 15: mod_base = OTHER; note = 2'-O-methyl modified nucleotide
  modified_base 16: mod_base = OTHER; note = 2'-fluoro modified nucleotide
  modified_base 17: mod_base = OTHER; note = 2'-O-methyl modified nucleotide
  modified_base 18: mod_base = OTHER; note = 2'-O-methyl modified nucleotide
  modified_base 19: mod_base = OTHER; note = 2'-O-methyl modified nucleotide with phosphorothioate linkage
  modified_base 20: mod_base = OTHER; note = 2'-O-methyl modified nucleotide with phosphorothioate linkage
  modified_base 21: mod_base = OTHER; note = 2'-O-methyl modified nucleotide
ttatggtgcaaggaatgagaa

SEQ ID NO: 314 - RNA, 21 nt, synthetic construct
  source 1..21: mol_type = other RNA
  modified_base 1: mod_base = OTHER; note = Vinyl-phosphonate 2'-O-methyl modified nucleotide with phosphorothioate linkage
  modified_base 2: mod_base = OTHER; note = 2'-fluoro modified nucleotide with phosphorothioate linkage
  modified_base 3: mod_base = OTHER; note = 2'-O-methyl modified nucleotide
  modified_base 4: mod_base = OTHER; note = 2'-O-methyl modified nucleotide
  modified_base 5: mod_base = OTHER; note = 2'-O-methyl modified nucleotide
  modified_base 6: mod_base = OTHER; note = 2'-fluoro modified nucleotide
  modified_base 7: mod_base = OTHER; note = 2'-O-methyl modified nucleotide
  modified_base 8: mod_base = OTHER; note = 2'-fluoro modified nucleotide
  modified_base 9: mod_base = OTHER; note = 2'-fluoro modified nucleotide
  modified_base 10: mod_base = OTHER; note = 2'-O-methyl modified nucleotide
  modified_base 11: mod_base = OTHER; note = 2'-O-methyl modified nucleotide
  modified_base 12: mod_base = OTHER; note = 2'-O-methyl modified nucleotide
  modified_base 13: mod_base = OTHER; note = 2'-O-methyl modified nucleotide
  modified_base 14: mod_base = OTHER; note = 2'-fluoro modified nucleotide
  modified_base 15: mod_base = OTHER; note = 2'-O-methyl modified nucleotide
  modified_base 16: mod_base = OTHER; note = 2'-fluoro modified nucleotide
  modified_base 17: mod_base = OTHER; note = 2'-O-methyl modified nucleotide
  modified_base 18: mod_base = OTHER; note = 2'-O-methyl modified nucleotide
  modified_base 19: mod_base = OTHER; note = 2'-O-methyl modified nucleotide with phosphorothioate linkage
  modified_base 20: mod_base = OTHER; note = 2'-O-methyl modified nucleotide with phosphorothioate linkage
  modified_base 21: mod_base = OTHER; note = 2'-O-methyl modified nucleotide
taacccagcagaaagccaata

SEQ ID NO: 315 - RNA, 21 nt, synthetic construct
  source 1..21: mol_type = other RNA
  modified_base 1: mod_base = OTHER; note = Vinyl-phosphonate 2'-O-methyl modified nucleotide with phosphorothioate linkage
  modified_base 2: mod_base = OTHER; note = 2'-fluoro modified nucleotide with phosphorothioate linkage
  modified_base 3: mod_base = OTHER; note = 2'-O-methyl modified nucleotide
  modified_base 4: mod_base = OTHER; note = 2'-O-methyl modified nucleotide
  modified_base 5: mod_base = OTHER; note = 2'-O-methyl modified nucleotide
  modified_base 6: mod_base = OTHER; note = 2'-fluoro modified nucleotide
  modified_base 7: mod_base = OTHER; note = 2'-O-methyl modified nucleotide
  modified_base 8: mod_base = OTHER; note = 2'-fluoro modified nucleotide
  modified_base 9: mod_base = OTHER; note = 2'-fluoro modified nucleotide
  modified_base 10: mod_base = OTHER; note = 2'-O-methyl modified nucleotide
  modified_base 11: mod_base = OTHER; note = 2'-O-methyl modified nucleotide
  modified_base 12: mod_base = OTHER; note = 2'-O-methyl modified nucleotide
  modified_base 13: mod_base = OTHER; note = 2'-O-methyl modified nucleotide
  modified_base 14: mod_base = OTHER; note = 2'-fluoro modified nucleotide
  modified_base 15: mod_base = OTHER; note = 2'-O-methyl modified nucleotide
  modified_base 16: mod_base = OTHER; note = 2'-fluoro modified nucleotide
  modified_base 17: mod_base = OTHER; note = 2'-O-methyl modified nucleotide
  modified_base 18: mod_base = OTHER; note = 2'-O-methyl modified nucleotide
  modified_base 19: mod_base = OTHER; note = 2'-O-methyl modified nucleotide with phosphorothioate linkage
  modified_base 20: mod_base = OTHER; note = 2'-O-methyl modified nucleotide with phosphorothioate linkage
  modified_base 21: mod_base = OTHER; note = 2'-O-methyl modified nucleotide
tggaaaatcatgtagaggagg

SEQ ID NO: 316 - RNA, 21 nt, synthetic construct
  source 1..21: mol_type = other RNA
  modified_base 1: mod_base = OTHER; note = Vinyl-phosphonate 2'-O-methyl modified nucleotide with phosphorothioate linkage
  modified_base 2: mod_base = OTHER; note = 2'-fluoro modified nucleotide with phosphorothioate linkage
  modified_base 3: mod_base = OTHER; note = 2'-O-methyl modified nucleotide
  modified_base 4: mod_base = OTHER; note = 2'-O-methyl modified nucleotide
  modified_base 5: mod_base = OTHER; note = 2'-O-methyl modified nucleotide
  modified_base 6: mod_base = OTHER; note = 2'-fluoro modified nucleotide
  modified_base 7: mod_base = OTHER; note = 2'-O-methyl modified nucleotide
  modified_base 8: mod_base = OTHER; note = 2'-fluoro modified nucleotide
  modified_base 9: mod_base = OTHER; note = 2'-fluoro modified nucleotide
  modified_base 10: mod_base = OTHER; note = 2'-O-methyl modified nucleotide
  modified_base 11: mod_base = OTHER; note = 2'-O-methyl modified nucleotide
  modified_base 12: mod_base = OTHER; note = 2'-O-methyl modified nucleotide
  modified_base 13: mod_base = OTHER; note = 2'-O-methyl modified nucleotide
  modified_base 14: mod_base = OTHER; note = 2'-fluoro modified nucleotide
  modified_base 15: mod_base = OTHER; note = 2'-O-methyl modified nucleotide
  modified_base 16: mod_base = OTHER; note = 2'-fluoro modified nucleotide
  modified_base 17: mod_base = OTHER; note = 2'-O-methyl modified nucleotide
  modified_base 18: mod_base = OTHER; note = 2'-O-methyl modified nucleotide
  modified_base 19: mod_base = OTHER; note = 2'-O-methyl modified nucleotide with phosphorothioate linkage
  modified_base 20: mod_base = OTHER; note = 2'-O-methyl modified nucleotide with phosphorothioate linkage
  modified_base 21: mod_base = OTHER; note = 2'-O-methyl modified nucleotide
tataagtgagccttgatcttg

SEQ ID NO: 317 - RNA, 21 nt, synthetic construct
  source 1..21: mol_type = other RNA
  modified_base 1: mod_base = OTHER; note = Vinyl-phosphonate 2'-O-methyl modified nucleotide with phosphorothioate linkage
  modified_base 2: mod_base = OTHER; note = 2'-fluoro modified nucleotide with phosphorothioate linkage
  modified_base 3: mod_base = OTHER; note = 2'-O-methyl modified nucleotide
  modified_base 4: mod_base = OTHER; note = 2'-O-methyl modified nucleotide
  modified_base 5: mod_base = OTHER; note = 2'-O-methyl modified nucleotide
  modified_base 6: mod_base = OTHER; note = 2'-fluoro modified nucleotide
  modified_base 7: mod_base = OTHER; note = 2'-O-methyl modified nucleotide
  modified_base 8: mod_base = OTHER; note = 2'-fluoro modified nucleotide
  modified_base 9: mod_base = OTHER; note = 2'-fluoro modified nucleotide
  modified_base 10: mod_base = OTHER; note = 2'-O-methyl modified nucleotide
  modified_base 11: mod_base = OTHER; note = 2'-O-methyl modified nucleotide
  modified_base 12: mod_base = OTHER; note = 2'-O-methyl modified nucleotide
  modified_base 13: mod_base = OTHER; note = 2'-O-methyl modified nucleotide
  modified_base 14: mod_base = OTHER; note = 2'-fluoro modified nucleotide
  modified_base 15: mod_base = OTHER; note = 2'-O-methyl modified nucleotide
  modified_base 16: mod_base = OTHER; note = 2'-fluoro modified nucleotide
  modified_base 17: mod_base = OTHER; note = 2'-O-methyl modified nucleotide
  modified_base 18: mod_base = OTHER; note = 2'-O-methyl modified nucleotide
  modified_base 19: mod_base = OTHER; note = 2'-O-methyl modified nucleotide with phosphorothioate linkage
  modified_base 20: mod_base = OTHER; note = 2'-O-methyl modified nucleotide with phosphorothioate linkage
  modified_base 21: mod_base = OTHER; note = 2'-O-methyl modified nucleotide
ttggtcatcacaatgctgagg

SEQ ID NO: 318 - RNA, 21 nt, synthetic construct
  source 1..21: mol_type = other RNA
  modified_base 1: mod_base = OTHER; note = Vinyl-phosphonate 2'-O-methyl modified nucleotide with phosphorothioate linkage
  modified_base 2: mod_base = OTHER; note = 2'-fluoro modified nucleotide with phosphorothioate linkage
  modified_base 3: mod_base = OTHER; note = 2'-O-methyl modified nucleotide
  modified_base 4: mod_base = OTHER; note = 2'-O-methyl modified nucleotide
  modified_base 5: mod_base = OTHER; note = 2'-O-methyl modified nucleotide
  modified_base 6: mod_base = OTHER; note = 2'-fluoro modified nucleotide
  modified_base 7: mod_base = OTHER; note = 2'-O-methyl modified nucleotide
  modified_base 8: mod_base = OTHER; note = 2'-fluoro modified nucleotide
  modified_base 9: mod_base = OTHER; note = 2'-fluoro modified nucleotide
  modified_base 10: mod_base = OTHER; note = 2'-O-methyl modified nucleotide
  modified_base 11: mod_base = OTHER; note = 2'-O-methyl modified nucleotide
  modified_base 12: mod_base = OTHER; note = 2'-O-methyl modified nucleotide
  modified_base 13: mod_base = OTHER; note = 2'-O-methyl modified nucleotide
  modified_base 14: mod_base = OTHER; note = 2'-fluoro modified nucleotide
  modified_base 15: mod_base = OTHER; note = 2'-O-methyl modified nucleotide
  modified_base 16: mod_base = OTHER; note = 2'-fluoro modified nucleotide
  modified_base 17: mod_base = OTHER; note = 2'-O-methyl modified nucleotide
  modified_base 18: mod_base = OTHER; note = 2'-O-methyl modified nucleotide
  modified_base 19: mod_base = OTHER; note = 2'-O-methyl modified nucleotide with phosphorothioate linkage
  modified_base 20: mod_base = OTHER; note = 2'-O-methyl modified nucleotide with phosphorothioate linkage
  modified_base 21: mod_base = OTHER; note = 2'-O-methyl modified nucleotide
ttgcacaagagaatgatgatc

SEQ ID NO: 319 - RNA, 21 nt, synthetic construct
  source 1..21: mol_type = other RNA
  modified_base 1: mod_base = OTHER; note = Vinyl-phosphonate 2'-O-methyl modified nucleotide with phosphorothioate linkage
  modified_base 2: mod_base = OTHER; note = 2'-fluoro modified nucleotide with phosphorothioate linkage
  modified_base 3: mod_base = OTHER; note = 2'-O-methyl modified nucleotide
  modified_base 4: mod_base = OTHER; note = 2'-O-methyl modified nucleotide
  modified_base 5: mod_base = OTHER; note = 2'-O-methyl modified nucleotide
  modified_base 6: mod_base = OTHER; note = 2'-fluoro modified nucleotide
  modified_base 7: mod_base = OTHER; note = 2'-O-methyl modified nucleotide
  modified_base 8: mod_base = OTHER; note = 2'-fluoro modified nucleotide
  modified_base 9: mod_base = OTHER; note = 2'-fluoro modified nucleotide
  modified_base 10: mod_base = OTHER; note = 2'-O-methyl modified nucleotide
  modified_base 11: mod_base = OTHER; note = 2'-O-methyl modified nucleotide
  modified_base 12: mod_base = OTHER; note = 2'-O-methyl modified nucleotide
  modified_base 13: mod_base = OTHER; note = 2'-O-methyl modified nucleotide
  modified_base 14: mod_base = OTHER; note = 2'-fluoro modified nucleotide
  modified_base 15: mod_base = OTHER; note = 2'-O-methyl modified nucleotide
  modified_base 16: mod_base = OTHER; note = 2'-fluoro modified nucleotide
  modified_base 17: mod_base = OTHER; note = 2'-O-methyl modified nucleotide
  modified_base 18: mod_base = OTHER; note = 2'-O-methyl modified nucleotide
  modified_base 19: mod_base = OTHER; note = 2'-O-methyl modified nucleotide with phosphorothioate linkage
  modified_base 20: mod_base = OTHER; note = 2'-O-methyl modified nucleotide with phosphorothioate linkage
  modified_base 21: mod_base = OTHER; note = 2'-O-methyl modified nucleotide
tagagaactgtgacggccaca

SEQ ID NO: 320 - RNA, 21 nt, synthetic construct
  source 1..21: mol_type = other RNA
  modified_base 1: mod_base = OTHER; note = Vinyl-phosphonate 2'-O-methyl modified nucleotide with phosphorothioate linkage
  modified_base 2: mod_base = OTHER; note = 2'-fluoro modified nucleotide with phosphorothioate linkage
  modified_base 3: mod_base = OTHER; note = 2'-O-methyl modified nucleotide
  modified_base 4: mod_base = OTHER; note = 2'-O-methyl modified nucleotide
  modified_base 5: mod_base = OTHER; note = 2'-O-methyl modified nucleotide
  modified_base 6: mod_base = OTHER; note = 2'-fluoro modified nucleotide
  modified_base 7: mod_base = OTHER; note = 2'-O-methyl modified nucleotide
  modified_base 8: mod_base = OTHER; note = 2'-fluoro modified nucleotide
  modified_base 9: mod_base = OTHER; note = 2'-fluoro modified nucleotide
  modified_base 10: mod_base = OTHER; note = 2'-O-methyl modified nucleotide
  modified_base 11: mod_base = OTHER; note = 2'-O-methyl modified nucleotide
  modified_base 12: mod_base = OTHER; note = 2'-O-methyl modified nucleotide
  modified_base 13: mod_base = OTHER; note = 2'-O-methyl modified nucleotide
  modified_base 14: mod_base = OTHER; note = 2'-fluoro modified nucleotide
  modified_base 15: mod_base = OTHER; note = 2'-O-methyl modified nucleotide
  modified_base 16: mod_base = OTHER; note = 2'-fluoro modified nucleotide
  modified_base 17: mod_base = OTHER; note = 2'-O-methyl modified nucleotide
  modified_base 18: mod_base = OTHER; note = 2'-O-methyl modified nucleotide
  modified_base 19: mod_base = OTHER; note = 2'-O-methyl modified nucleotide with phosphorothioate linkage
  modified_base 20: mod_base = OTHER; note = 2'-O-methyl modified nucleotide with phosphorothioate linkage
  modified_base 21: mod_base = OTHER; note = 2'-O-methyl modified nucleotide
tagaattgctttgggaccaga

SEQ ID NO: 321 - RNA, 21 nt, synthetic construct
  source 1..21: mol_type = other RNA
  modified_base 1: mod_base = OTHER; note = Vinyl-phosphonate 2'-O-methyl modified nucleotide with phosphorothioate linkage
  modified_base 2: mod_base = OTHER; note = 2'-fluoro modified nucleotide with phosphorothioate linkage
  modified_base 3: mod_base = OTHER; note = 2'-O-methyl modified nucleotide
  modified_base 4: mod_base = OTHER; note = 2'-O-methyl modified nucleotide
  modified_base 5: mod_base = OTHER; note = 2'-O-methyl modified nucleotide
  modified_base 6: mod_base = OTHER; note = 2'-fluoro modified nucleotide
  modified_base 7: mod_base = OTHER; note = 2'-O-methyl modified nucleotide
  modified_base 8: mod_base = OTHER; note = 2'-fluoro modified nucleotide
  modified_base 9: mod_base = OTHER; note = 2'-fluoro modified nucleotide
  modified_base 10: mod_base = OTHER; note = 2'-O-methyl modified nucleotide
  modified_base 11: mod_base = OTHER; note = 2'-O-methyl modified nucleotide
  modified_base 12: mod_base = OTHER; note = 2'-O-methyl modified nucleotide
  modified_base 13: mod_base = OTHER; note = 2'-O-methyl modified nucleotide
  modified_base 14: mod_base = OTHER; note = 2'-fluoro modified nucleotide
  modified_base 15: mod_base = OTHER; note = 2'-O-methyl modified nucleotide
  modified_base 16: mod_base = OTHER; note = 2'-fluoro modified nucleotide
  modified_base 17: mod_base = OTHER; note = 2'-O-methyl modified nucleotide
  modified_base 18: mod_base = OTHER; note = 2'-O-methyl modified nucleotide
  modified_base 19: mod_base = OTHER; note = 2'-O-methyl modified nucleotide with phosphorothioate linkage
  modified_base 20: mod_base = OTHER; note = 2'-O-methyl modified nucleotide with phosphorothioate linkage
  modified_base 21: mod_base = OTHER; note = 2'-O-methyl modified nucleotide
ttctgatagatgtactggaaa

SEQ ID NO: 322 - RNA, 21 nt, synthetic construct
  source 1..21: mol_type = other RNA
  modified_base 1: mod_base = OTHER; note = Vinyl-phosphonate 2'-O-methyl modified nucleotide with phosphorothioate linkage
  modified_base 2: mod_base = OTHER; note = 2'-fluoro modified nucleotide with phosphorothioate linkage
  modified_base 3: mod_base = OTHER; note = 2'-O-methyl modified nucleotide
  modified_base 4: mod_base = OTHER; note = 2'-O-methyl modified nucleotide
  modified_base 5: mod_base = OTHER; note = 2'-O-methyl modified nucleotide
  modified_base 6: mod_base = OTHER; note = 2'-fluoro modified nucleotide
  modified_base 7: mod_base = OTHER; note = 2'-O-methyl modified nucleotide
  modified_base 8: mod_base = OTHER; note = 2'-fluoro modified nucleotide
  modified_base 9: mod_base = OTHER; note = 2'-fluoro modified nucleotide
  modified_base 10: mod_base = OTHER; note = 2'-O-methyl modified nucleotide
  modified_base 11: mod_base = OTHER; note = 2'-O-methyl modified nucleotide
  modified_base 12: mod_base = OTHER; note = 2'-O-methyl modified nucleotide
  modified_base 13: mod_base = OTHER; note = 2'-O-methyl modified nucleotide
  modified_base 14: mod_base = OTHER; note = 2'-fluoro modified nucleotide
  modified_base 15: mod_base = OTHER; note = 2'-O-methyl modified nucleotide
  modified_base 16: mod_base = OTHER; note = 2'-fluoro modified nucleotide
  modified_base 17: mod_base = OTHER; note = 2'-O-methyl modified nucleotide
  modified_base 18: mod_base = OTHER; note = 2'-O-methyl modified nucleotide
  modified_base 19: mod_base = OTHER; note = 2'-O-methyl modified nucleotide with phosphorothioate linkage
  modified_base 20: mod_base = OTHER; note = 2'-O-methyl modified nucleotide with phosphorothioate linkage
  modified_base 21: mod_base = OTHER; note = 2'-O-methyl modified nucleotide
tttctgatagatgtactggaa

SEQ ID NO: 323 - RNA, 21 nt, synthetic construct
  source 1..21: mol_type = other RNA
  modified_base 1: mod_base = OTHER; note = Vinyl-phosphonate 2'-O-methyl modified nucleotide with phosphorothioate linkage
  modified_base 2: mod_base = OTHER; note = 2'-fluoro modified nucleotide with phosphorothioate linkage
  modified_base 3: mod_base = OTHER; note = 2'-O-methyl modified nucleotide
  modified_base 4: mod_base = OTHER; note = 2'-O-methyl modified nucleotide
  modified_base 5: mod_base = OTHER; note = 2'-O-methyl modified nucleotide
  modified_base 6: mod_base = OTHER; note = 2'-fluoro modified nucleotide
  modified_base 7: mod_base = OTHER; note = 2'-O-methyl modified nucleotide
  modified_base 8: mod_base = OTHER; note = 2'-fluoro modified nucleotide
  modified_base 9: mod_base = OTHER; note = 2'-fluoro modified nucleotide
  modified_base 10: mod_base = OTHER; note = 2'-O-methyl modified nucleotide
  modified_base 11: mod_base = OTHER; note = 2'-O-methyl modified nucleotide
  modified_base 12: mod_base = OTHER; note = 2'-O-methyl modified nucleotide
  modified_base 13: mod_base = OTHER; note = 2'-O-methyl modified nucleotide
  modified_base 14: mod_base = OTHER; note = 2'-fluoro modified nucleotide
  modified_base 15: mod_base = OTHER; note = 2'-O-methyl modified nucleotide
  modified_base 16: mod_base = OTHER; note = 2'-fluoro modified nucleotide
  modified_base 17: mod_base = OTHER; note = 2'-O-methyl modified nucleotide
  modified_base 18: mod_base = OTHER; note = 2'-O-methyl modified nucleotide
  modified_base 19: mod_base = OTHER; note = 2'-O-methyl modified nucleotide with phosphorothioate linkage
  modified_base 20: mod_base = OTHER; note = 2'-O-methyl modified nucleotide with phosphorothioate linkage
  modified_base 21: mod_base = OTHER; note = 2'-O-methyl modified nucleotide
tttgatgattctgatagatgt

SEQ ID NO: 324 - RNA, 21 nt, synthetic construct
  source 1..21: mol_type = other RNA
  modified_base 1: mod_base = OTHER; note = Vinyl-phosphonate 2'-O-methyl modified nucleotide with phosphorothioate linkage
  modified_base 2: mod_base = OTHER; note = 2'-fluoro modified nucleotide with phosphorothioate linkage
  modified_base 3: mod_base = OTHER; note = 2'-O-methyl modified nucleotide
  modified_base 4: mod_base = OTHER; note = 2'-O-methyl modified nucleotide
  modified_base 5: mod_base = OTHER; note = 2'-O-methyl modified nucleotide
  modified_base 6: mod_base = OTHER; note = 2'-fluoro modified nucleotide
  modified_base 7: mod_base = OTHER; note = 2'-O-methyl modified nucleotide
  modified_base 8: mod_base = OTHER; note = 2'-fluoro modified nucleotide
  modified_base 9: mod_base = OTHER; note = 2'-fluoro modified nucleotide
  modified_base 10: mod_base = OTHER; note = 2'-O-methyl modified nucleotide
  modified_base 11: mod_base = OTHER; note = 2'-O-methyl modified nucleotide
  modified_base 12: mod_base = OTHER; note = 2'-O-methyl modified nucleotide
  modified_base 13: mod_base = OTHER; note = 2'-O-methyl modified nucleotide
  modified_base 14: mod_base = OTHER; note = 2'-fluoro modified nucleotide
  modified_base 15: mod_base = OTHER; note = 2'-O-methyl modified nucleotide
  modified_base 16: mod_base = OTHER; note = 2'-fluoro modified nucleotide
  modified_base 17: mod_base = OTHER; note = 2'-O-methyl modified nucleotide
  modified_base 18: mod_base = OTHER; note = 2'-O-methyl modified nucleotide
  modified_base 19: mod_base = OTHER; note = 2'-O-methyl modified nucleotide with phosphorothioate linkage
  modified_base 20: mod_base = OTHER; note = 2'-O-methyl modified nucleotide with phosphorothioate linkage
  modified_base 21: mod_base = OTHER; note = 2'-O-methyl modified nucleotide
ttcaggaattgagtgacttta

SEQ ID NO: 325 - RNA, 21 nt, synthetic construct
  source 1..21: mol_type = other RNA
  modified_base 1: mod_base = OTHER; note = Vinyl-phosphonate 2'-O-methyl modified nucleotide with phosphorothioate linkage
  modified_base 2: mod_base = OTHER; note = 2'-fluoro modified nucleotide with phosphorothioate linkage
  modified_base 3: mod_base = OTHER; note = 2'-O-methyl modified nucleotide
  modified_base 4: mod_base = OTHER; note = 2'-O-methyl modified nucleotide
  modified_base 5: mod_base = OTHER; note = 2'-O-methyl modified nucleotide
  modified_base 6: mod_base = OTHER; note = 2'-fluoro modified nucleotide
  modified_base 7: mod_base = OTHER; note = 2'-O-methyl modified nucleotide
  modified_base 8: mod_base = OTHER; note = 2'-fluoro modified nucleotide
  modified_base 9: mod_base = OTHER; note = 2'-fluoro modified nucleotide
  modified_base 10: mod_base = OTHER; note = 2'-O-methyl modified nucleotide
  modified_base 11: mod_base = OTHER; note = 2'-O-methyl modified nucleotide
  modified_base 12: mod_base = OTHER; note = 2'-O-methyl modified nucleotide
  modified_base 13: mod_base = OTHER; note = 2'-O-methyl modified nucleotide
  modified_base 14: mod_base = OTHER; note = 2'-fluoro modified nucleotide
  modified_base 15: mod_base = OTHER; note = 2'-O-methyl modified nucleotide
  modified_base 16: mod_base = OTHER; note = 2'-fluoro modified nucleotide
  modified_base 17: mod_base = OTHER; note = 2'-O-methyl modified nucleotide
  modified_base 18: mod_base = OTHER; note = 2'-O-methyl modified nucleotide
  modified_base 19: mod_base = OTHER; note = 2'-O-methyl modified nucleotide with phosphorothioate linkage
  modified_base 20: mod_base = OTHER; note = 2'-O-methyl modified nucleotide with phosphorothioate linkage
  modified_base 21: mod_base = OTHER; note = 2'-O-methyl modified nucleotide
ttatattgattagttcaggaa

SEQ ID NO: 326 - RNA, 21 nt, synthetic construct
  source 1..21: mol_type = other RNA
  modified_base 1: mod_base = OTHER; note = Vinyl-phosphonate 2'-O-methyl modified nucleotide with phosphorothioate linkage
  modified_base 2: mod_base = OTHER; note = 2'-fluoro modified nucleotide with phosphorothioate linkage
  modified_base 3: mod_base = OTHER; note = 2'-O-methyl modified nucleotide
  modified_base 4: mod_base = OTHER; note = 2'-O-methyl modified nucleotide
  modified_base 5: mod_base = OTHER; note = 2'-O-methyl modified nucleotide
  modified_base 6: mod_base = OTHER; note = 2'-fluoro modified nucleotide
  modified_base 7: mod_base = OTHER; note = 2'-O-methyl modified nucleotide
  modified_base 8: mod_base = OTHER; note = 2'-fluoro modified nucleotide
  modified_base 9: mod_base = OTHER; note = 2'-fluoro modified nucleotide
  modified_base 10: mod_base = OTHER; note = 2'-O-methyl modified nucleotide
  modified_base 11: mod_base = OTHER; note = 2'-O-methyl modified nucleotide
  modified_base 12: mod_base = OTHER; note = 2'-O-methyl modified nucleotide
  modified_base 13: mod_base = OTHER; note = 2'-O-methyl modified nucleotide
  modified_base 14: mod_base = OTHER; note = 2'-fluoro modified nucleotide
  modified_base 15: mod_base = OTHER; note = 2'-O-methyl modified nucleotide
  modified_base 16: mod_base = OTHER; note = 2'-fluoro modified nucleotide
  modified_base 17: mod_base = OTHER; note = 2'-O-methyl modified nucleotide
  modified_base 18: mod_base = OTHER; note = 2'-O-methyl modified nucleotide
  modified_base 19: mod_base = OTHER; note = 2'-O-methyl modified nucleotide with phosphorothioate linkage
  modified_base 20: mod_base = OTHER; note = 2'-O-methyl modified nucleotide with phosphorothioate linkage
  modified_base 21: mod_base = OTHER; note = 2'-O-methyl modified nucleotide
ttatatattgattagttcagg

SEQ ID NO: 327 - RNA, 21 nt, synthetic construct
  source 1..21: mol_type = other RNA
  modified_base 1: mod_base = OTHER; note = Vinyl-phosphonate 2'-O-methyl modified nucleotide with phosphorothioate linkage
  modified_base 2: mod_base = OTHER; note = 2'-fluoro modified nucleotide with phosphorothioate linkage
  modified_base 3: mod_base = OTHER; note = 2'-O-methyl modified nucleotide
  modified_base 4: mod_base = OTHER; note = 2'-O-methyl modified nucleotide
  modified_base 5: mod_base = OTHER; note = 2'-O-methyl modified nucleotide
  modified_base 6: mod_base = OTHER; note = 2'-fluoro modified nucleotide
  modified_base 7: mod_base = OTHER; note = 2'-O-methyl modified nucleotide
  modified_base 8: mod_base = OTHER; note = 2'-fluoro modified nucleotide
  modified_base 9: mod_base = OTHER; note = 2'-fluoro modified nucleotide
  modified_base 10: mod_base = OTHER; note = 2'-O-methyl modified nucleotide
  modified_base 11: mod_base = OTHER; note = 2'-O-methyl modified nucleotide
  modified_base 12: mod_base = OTHER; note = 2'-O-methyl modified nucleotide
  modified_base 13: mod_base = OTHER; note = 2'-O-methyl modified nucleotide
  modified_base 14: mod_base = OTHER; note = 2'-fluoro modified nucleotide
  modified_base 15: mod_base = OTHER; note = 2'-O-methyl modified nucleotide
  modified_base 16: mod_base = OTHER; note = 2'-fluoro modified nucleotide
  modified_base 17: mod_base = OTHER; note = 2'-O-methyl modified nucleotide
  modified_base 18: mod_base = OTHER; note = 2'-O-methyl modified nucleotide
  modified_base 19: mod_base = OTHER; note = 2'-O-methyl modified nucleotide with phosphorothioate linkage
  modified_base 20: mod_base = OTHER; note = 2'-O-methyl modified nucleotide with phosphorothioate linkage
  modified_base 21: mod_base = OTHER; note = 2'-O-methyl modified nucleotide
ttgcaaggaatgagaaccagg

SEQ ID NO: 328 - RNA, 21 nt, synthetic construct
  source 1..21: mol_type = other RNA
  modified_base 1: mod_base = OTHER; note = Vinyl-phosphonate 2'-O-methyl modified nucleotide with phosphorothioate linkage
  modified_base 2: mod_base = OTHER; note = 2'-fluoro modified nucleotide with phosphorothioate linkage
  modified_base 3: mod_base = OTHER; note = 2'-O-methyl modified nucleotide
  modified_base 4: mod_base = OTHER; note = 2'-O-methyl modified nucleotide
  modified_base 5: mod_base = OTHER; note = 2'-O-methyl modified nucleotide
  modified_base 6: mod_base = OTHER; note = 2'-fluoro modified nucleotide
  modified_base 7: mod_base = OTHER; note = 2'-O-methyl modified nucleotide
  modified_base 8: mod_base = OTHER; note = 2'-fluoro modified nucleotide
  modified_base 9: mod_base = OTHER; note = 2'-fluoro modified nucleotide
  modified_base 10: mod_base = OTHER; note = 2'-O-methyl modified nucleotide
  modified_base 11: mod_base = OTHER; note = 2'-O-methyl modified nucleotide
  modified_base 12: mod_base = OTHER; note = 2'-O-methyl modified nucleotide
  modified_base 13: mod_base = OTHER; note = 2'-O-methyl modified nucleotide
  modified_base 14: mod_base = OTHER; note = 2'-fluoro modified nucleotide
  modified_base 15: mod_base = OTHER; note = 2'-O-methyl modified nucleotide
  modified_base 16: mod_base = OTHER; note = 2'-fluoro modified nucleotide
  modified_base 17: mod_base = OTHER; note = 2'-O-methyl modified nucleotide
  modified_base 18: mod_base = OTHER; note = 2'-O-methyl modified nucleotide
  modified_base 19: mod_base = OTHER; note = 2'-O-methyl modified nucleotide with phosphorothioate linkage
  modified_base 20: mod_base = OTHER; note = 2'-O-methyl modified nucleotide with phosphorothioate linkage
  modified_base 21: mod_base = OTHER; note = 2'-O-methyl modified nucleotide
ttatggtgcaaggaatgagaa

SEQ ID NO: 329 - RNA, 21 nt, synthetic construct
  source 1..21: mol_type = other RNA
  modified_base 1: mod_base = OTHER; note = Vinyl-phosphonate 2'-O-methyl modified nucleotide with phosphorothioate linkage
  modified_base 2: mod_base = OTHER; note = 2'-fluoro modified nucleotide with phosphorothioate linkage
  modified_base 3: mod_base = OTHER; note = 2'-O-methyl modified nucleotide
  modified_base 4: mod_base = OTHER; note = 2'-O-methyl modified nucleotide
  modified_base 5: mod_base = OTHER; note = 2'-O-methyl modified nucleotide
  modified_base 6: mod_base = OTHER; note = 2'-fluoro modified nucleotide
  modified_base 7: mod_base = OTHER; note = 2'-O-methyl modified nucleotide
  modified_base 8: mod_base = OTHER; note = 2'-fluoro modified nucleotide
  modified_base 9: mod_base = OTHER; note = 2'-fluoro modified nucleotide
  modified_base 10: mod_base = OTHER; note = 2'-O-methyl modified nucleotide
  modified_base 11: mod_base = OTHER; note = 2'-O-methyl modified nucleotide
  modified_base 12: mod_base = OTHER; note = 2'-O-methyl modified nucleotide
  modified_base 13: mod_base = OTHER; note = 2'-O-methyl modified nucleotide
  modified_base 14: mod_base = OTHER; note = 2'-fluoro modified nucleotide
  modified_base 15: mod_base = OTHER; note = 2'-O-methyl modified nucleotide
  modified_base 16: mod_base = OTHER; note = 2'-fluoro modified nucleotide
  modified_base 17: mod_base = OTHER; note = 2'-O-methyl modified nucleotide
  modified_base 18: mod_base = OTHER; note = 2'-O-methyl modified nucleotide
  modified_base 19: mod_base = OTHER; note = 2'-O-methyl modified nucleotide with phosphorothioate linkage
  modified_base 20: mod_base = OTHER; note = 2'-O-methyl modified nucleotide with phosphorothioate linkage
  modified_base 21: mod_base = OTHER; note = 2'-O-methyl modified nucleotide
taacccagcagaaagccaata

SEQ ID NO: 330 - RNA, 21 nt, synthetic construct
  source 1..21: mol_type = other RNA
  modified_base 1: mod_base = OTHER; note = Vinyl-phosphonate 2'-O-methyl modified nucleotide with phosphorothioate linkage
  modified_base 2: mod_base = OTHER; note = 2'-fluoro modified nucleotide with phosphorothioate linkage
  modified_base 3: mod_base = OTHER; note = 2'-O-methyl modified nucleotide
  modified_base 4: mod_base = OTHER; note = 2'-O-methyl modified nucleotide
  modified_base 5: mod_base = OTHER; note = 2'-O-methyl modified nucleotide
  modified_base 6: mod_base = OTHER; note = 2'-fluoro modified nucleotide
  modified_base 7: mod_base = OTHER; note = 2'-O-methyl modified nucleotide
  modified_base 8: mod_base = OTHER; note = 2'-fluoro modified nucleotide
  modified_base 9: mod_base = OTHER; note = 2'-fluoro modified nucleotide
  modified_base 10: mod_base = OTHER; note = 2'-O-methyl modified nucleotide
  modified_base 11: mod_base = OTHER; note = 2'-O-methyl modified nucleotide
  modified_base 12: mod_base = OTHER; note = 2'-O-methyl modified nucleotide
  modified_base 13: mod_base = OTHER; note = 2'-O-methyl modified nucleotide
  modified_base 14: mod_base = OTHER; note = 2'-fluoro modified nucleotide
  modified_base 15: mod_base = OTHER; note = 2'-O-methyl modified nucleotide
  modified_base 16: mod_base = OTHER; note = 2'-fluoro modified nucleotide
  modified_base 17: mod_base = OTHER; note = 2'-O-methyl modified nucleotide
  modified_base 18: mod_base = OTHER; note = 2'-O-methyl modified nucleotide
  modified_base 19: mod_base = OTHER; note = 2'-O-methyl modified nucleotide with phosphorothioate linkage
  modified_base 20: mod_base = OTHER; note = 2'-O-methyl modified nucleotide with phosphorothioate linkage
  modified_base 21: mod_base = OTHER; note = 2'-O-methyl modified nucleotide
tggaaaatcatgtagaggagg

SEQ ID NO: 331 - RNA, 21 nt, synthetic construct
  source 1..21: mol_type = other RNA
  modified_base 1: mod_base = OTHER; note = Vinyl-phosphonate 2'-O-methyl modified nucleotide with phosphorothioate linkage
  modified_base 2: mod_base = OTHER; note = 2'-fluoro modified nucleotide with phosphorothioate linkage
  modified_base 3: mod_base = OTHER; note = 2'-O-methyl modified nucleotide
  modified_base 4: mod_base = OTHER; note = 2'-O-methyl modified nucleotide
  modified_base 5: mod_base = OTHER; note = 2'-O-methyl modified nucleotide
  modified_base 6: mod_base = OTHER; note = 2'-fluoro modified nucleotide
  modified_base 7: mod_base = OTHER; note = 2'-O-methyl modified nucleotide
  modified_base 8: mod_base = OTHER; note = 2'-O-methyl modified nucleotide
  modified_base 9: mod_base = OTHER; note = 2'-O-methyl modified nucleotide
  modified_base 10: mod_base = OTHER; note = 2'-O-methyl modified nucleotide
  modified_base 11: mod_base = OTHER; note = 2'-O-methyl modified nucleotide
  modified_base 12: mod_base = OTHER; note = 2'-O-methyl modified nucleotide
  modified_base 13: mod_base = OTHER; note = 2'-O-methyl modified nucleotide
  modified_base 14: mod_base = OTHER; note = 2'-fluoro modified nucleotide
  modified_base 15: mod_base = OTHER; note = 2'-O-methyl modified nucleotide
  modified_base 16: mod_base = OTHER; note = 2'-fluoro modified nucleotide
  modified_base 17: mod_base = OTHER; note = 2'-O-methyl modified nucleotide
  modified_base 18: mod_base = OTHER; note = 2'-O-methyl modified nucleotide
  modified_base 19: mod_base = OTHER; note = 2'-O-methyl modified nucleotide with phosphorothioate linkage
  modified_base 20: mod_base = OTHER; note = 2'-O-methyl modified nucleotide with phosphorothioate linkage
  modified_base 21: mod_base = OTHER; note = 2'-O-methyl modified nucleotide
tataagtgagccttgatcttg

SEQ ID NO: 332 - RNA, 21 nt, synthetic construct
  source 1..21: mol_type = other RNA
  modified_base 1: mod_base = OTHER; note = Vinyl-phosphonate 2'-O-methyl modified nucleotide with phosphorothioate linkage
  modified_base 2: mod_base = OTHER; note = 2'-fluoro modified nucleotide with phosphorothioate linkage
  modified_base 3: mod_base = OTHER; note = 2'-O-methyl modified nucleotide
  modified_base 4: mod_base = OTHER; note = 2'-O-methyl modified nucleotide
  modified_base 5: mod_base = OTHER; note = 2'-O-methyl modified nucleotide
  modified_base 6: mod_base = OTHER; note = 2'-fluoro modified nucleotide
  modified_base 7: mod_base = OTHER; note = 2'-O-methyl modified nucleotide
  modified_base 8: mod_base = OTHER; note = 2'-O-methyl modified nucleotide
  modified_base 9: mod_base = OTHER; note = 2'-O-methyl modified nucleotide
  modified_base 10: mod_base = OTHER; note = 2'-O-methyl modified nucleotide
  modified_base 11: mod_base = OTHER; note = 2'-O-methyl modified nucleotide
  modified_base 12: mod_base = OTHER; note = 2'-O-methyl modified nucleotide
  modified_base 13: mod_base = OTHER; note = 2'-O-methyl modified nucleotide
  modified_base 14: mod_base = OTHER; note = 2'-fluoro modified nucleotide
  modified_base 15: mod_base = OTHER; note = 2'-O-methyl modified nucleotide
  modified_base 16: mod_base = OTHER; note = 2'-fluoro modified nucleotide
  modified_base 17: mod_base = OTHER; note = 2'-O-methyl modified nucleotide
  modified_base 18: mod_base = OTHER; note = 2'-O-methyl modified nucleotide
  modified_base 19: mod_base = OTHER; note = 2'-O-methyl modified nucleotide with phosphorothioate linkage
  modified_base 20: mod_base = OTHER; note = 2'-O-methyl modified nucleotide with phosphorothioate linkage
  modified_base 21: mod_base = OTHER; note = 2'-O-methyl modified nucleotide
ttggtcatcacaatgctgagg

SEQ ID NO: 333 - RNA, 21 nt, synthetic construct
  source 1..21: mol_type = other RNA
  modified_base 1: mod_base = OTHER; note = Vinyl-phosphonate 2'-O-methyl modified nucleotide with phosphorothioate linkage
  modified_base 2: mod_base = OTHER; note = 2'-fluoro modified nucleotide with phosphorothioate linkage
  modified_base 3: mod_base = OTHER; note = 2'-O-methyl modified nucleotide
  modified_base 4: mod_base = OTHER; note = 2'-O-methyl modified nucleotide
  modified_base 5: mod_base = OTHER; note = 2'-O-methyl modified nucleotide
  modified_base 6: mod_base = OTHER; note = 2'-fluoro modified nucleotide
  modified_base 7: mod_base = OTHER; note = 2'-O-methyl modified nucleotide
  modified_base 8: mod_base = OTHER; note = 2'-O-methyl modified nucleotide
  modified_base 9: mod_base = OTHER; note = 2'-O-methyl modified nucleotide
  modified_base 10: mod_base = OTHER; note = 2'-O-methyl modified nucleotide
  modified_base 11: mod_base = OTHER; note = 2'-O-methyl modified nucleotide
  modified_base 12: mod_base = OTHER; note = 2'-O-methyl modified nucleotide
  modified_base 13: mod_base = OTHER; note = 2'-O-methyl modified nucleotide
  modified_base 14: mod_base = OTHER; note = 2'-fluoro modified nucleotide
  modified_base 15: mod_base = OTHER; note = 2'-O-methyl modified nucleotide
  modified_base 16: mod_base = OTHER; note = 2'-fluoro modified nucleotide
  modified_base 17: mod_base = OTHER; note = 2'-O-methyl modified nucleotide
  modified_base 18: mod_base = OTHER; note = 2'-O-methyl modified nucleotide
  modified_base 19: mod_base = OTHER; note = 2'-O-methyl modified nucleotide with phosphorothioate linkage
  modified_base 20: mod_base = OTHER; note = 2'-O-methyl modified nucleotide with phosphorothioate linkage
  modified_base 21: mod_base = OTHER; note = 2'-O-methyl modified nucleotide
ttgcacaagagaatgatgatc

SEQ ID NO: 334 - RNA, 21 nt, synthetic construct
  source 1..21: mol_type = other RNA
  modified_base 1: mod_base = OTHER; note = Vinyl-phosphonate 2'-O-methyl modified nucleotide with phosphorothioate linkage
  modified_base 2: mod_base = OTHER; note = 2'-fluoro modified nucleotide with phosphorothioate linkage
  modified_base 3: mod_base = OTHER; note = 2'-O-methyl modified nucleotide
  modified_base 4: mod_base = OTHER; note = 2'-O-methyl modified nucleotide
  modified_base 5: mod_base = OTHER; note = 2'-O-methyl modified nucleotide
  modified_base 6: mod_base = OTHER; note = 2'-fluoro modified nucleotide
  modified_base 7: mod_base = OTHER; note = 2'-O-methyl modified nucleotide
  modified_base 8: mod_base = OTHER; note = 2'-O-methyl modified nucleotide
  modified_base 9: mod_base = OTHER; note = 2'-O-methyl modified nucleotide
  modified_base 10: mod_base = OTHER; note = 2'-O-methyl modified nucleotide
  modified_base 11: mod_base = OTHER; note = 2'-O-methyl modified nucleotide
  modified_base 12: mod_base = OTHER; note = 2'-O-methyl modified nucleotide
  modified_base 13: mod_base = OTHER; note = 2'-O-methyl modified nucleotide
  modified_base 14: mod_base = OTHER; note = 2'-fluoro modified nucleotide
  modified_base 15: mod_base = OTHER; note = 2'-O-methyl modified nucleotide
  modified_base 16: mod_base = OTHER; note = 2'-fluoro modified nucleotide
  modified_base 17: mod_base = OTHER; note = 2'-O-methyl modified nucleotide
  modified_base 18: mod_base = OTHER; note = 2'-O-methyl modified nucleotide
  modified_base 19: mod_base = OTHER; note = 2'-O-methyl modified nucleotide with phosphorothioate linkage
  modified_base 20: mod_base = OTHER; note = 2'-O-methyl modified nucleotide with phosphorothioate linkage
  modified_base 21: mod_base = OTHER; note = 2'-O-methyl modified nucleotide
tagagaactgtgacggccaca

SEQ ID NO: 335 - RNA, 21 nt, synthetic construct
  source 1..21: mol_type = other RNA
  modified_base 1: mod_base = OTHER; note = Vinyl-phosphonate 2'-O-methyl modified nucleotide with phosphorothioate linkage
  modified_base 2: mod_base = OTHER; note = 2'-fluoro modified nucleotide with phosphorothioate linkage
  modified_base 3: mod_base = OTHER; note = 2'-O-methyl modified nucleotide
  modified_base 4: mod_base = OTHER; note = 2'-O-methyl modified nucleotide
  modified_base 5: mod_base = OTHER; note = 2'-O-methyl modified nucleotide
  modified_base 6: mod_base = OTHER; note = 2'-fluoro modified nucleotide
  modified_base 7: mod_base = OTHER; note = 2'-O-methyl modified nucleotide
  modified_base 8: mod_base = OTHER; note = 2'-O-methyl modified nucleotide
  modified_base 9: mod_base = OTHER; note = 2'-O-methyl modified nucleotide
  modified_base 10: mod_base = OTHER; note = 2'-O-methyl modified nucleotide
  modified_base 11: mod_base = OTHER; note = 2'-O-methyl modified nucleotide
  modified_base 12: mod_base = OTHER; note = 2'-O-methyl modified nucleotide
  modified_base 13: mod_base = OTHER; note = 2'-O-methyl modified nucleotide
  modified_base 14: mod_base = OTHER; note = 2'-fluoro modified nucleotide
  modified_base 15: mod_base = OTHER; note = 2'-O-methyl modified nucleotide
  modified_base 16: mod_base = OTHER; note = 2'-fluoro modified nucleotide
  modified_base 17: mod_base = OTHER; note = 2'-O-methyl modified nucleotide
  modified_base 18: mod_base = OTHER; note = 2'-O-methyl modified nucleotide
  modified_base 19: mod_base = OTHER; note = 2'-O-methyl modified nucleotide with phosphorothioate linkage
  modified_base 20: mod_base = OTHER; note = 2'-O-methyl modified nucleotide with phosphorothioate linkage
  modified_base 21: mod_base = OTHER; note = 2'-O-methyl modified nucleotide
tagaattgctttgggaccaga

SEQ ID NO: 336 - RNA, 21 nt, synthetic construct
  source 1..21: mol_type = other RNA
  modified_base 1: mod_base = OTHER; note = Vinyl-phosphonate 2'-O-methyl modified nucleotide with phosphorothioate linkage
  modified_base 2: mod_base = OTHER; note = 2'-fluoro modified nucleotide with phosphorothioate linkage
  modified_base 3: mod_base = OTHER; note = 2'-O-methyl modified nucleotide
  modified_base 4: mod_base = OTHER; note = 2'-O-methyl modified nucleotide
  modified_base 5: mod_base = OTHER; note = 2'-O-methyl modified nucleotide
  modified_base 6: mod_base = OTHER; note = 2'-fluoro modified nucleotide
  modified_base 7: mod_base = OTHER; note = 2'-O-methyl modified nucleotide
  modified_base 8: mod_base = OTHER; note = 2'-O-methyl modified nucleotide
  modified_base 9: mod_base = OTHER; note = 2'-O-methyl modified nucleotide
  modified_base 10: mod_base = OTHER; note = 2'-O-methyl modified nucleotide
  modified_base 11: mod_base = OTHER; note = 2'-O-methyl modified nucleotide
  modified_base 12: mod_base = OTHER; note = 2'-O-methyl modified nucleotide
  modified_base 13: mod_base = OTHER; note = 2'-O-methyl modified nucleotide
  modified_base 14: mod_base = OTHER; note = 2'-fluoro modified nucleotide
  modified_base 15: mod_base = OTHER; note = 2'-O-methyl modified nucleotide
  modified_base 16: mod_base = OTHER; note = 2'-fluoro modified nucleotide
  modified_base 17: mod_base = OTHER; note = 2'-O-methyl modified nucleotide
  modified_base 18: mod_base = OTHER; note = 2'-O-methyl modified nucleotide
  modified_base 19: mod_base = OTHER; note = 2'-O-methyl modified nucleotide with phosphorothioate linkage
  modified_base 20: mod_base = OTHER; note = 2'-O-methyl modified nucleotide with phosphorothioate linkage
  modified_base 21: mod_base = OTHER; note = 2'-O-methyl modified nucleotide
ttctgatagatgtactggaaa

SEQ ID NO: 337 - RNA, 21 nt, synthetic construct
  source 1..21: mol_type = other RNA
  modified_base 1: mod_base = OTHER; note = Vinyl-phosphonate 2'-O-methyl modified nucleotide with phosphorothioate linkage
  modified_base 2: mod_base = OTHER; note = 2'-fluoro modified nucleotide with phosphorothioate linkage
  modified_base 3: mod_base = OTHER; note = 2'-O-methyl modified nucleotide
  modified_base 4: mod_base = OTHER; note = 2'-O-methyl modified nucleotide
  modified_base 5: mod_base = OTHER; note = 2'-O-methyl modified nucleotide
  modified_base 6: mod_base = OTHER; note = 2'-fluoro modified nucleotide
  modified_base 7: mod_base = OTHER; note = 2'-O-methyl modified nucleotide
  modified_base 8: mod_base = OTHER; note = 2'-O-methyl modified nucleotide
  modified_base 9: mod_base = OTHER; note = 2'-O-methyl modified nucleotide
  modified_base 10: mod_base = OTHER; note = 2'-O-methyl modified nucleotide
  modified_base 11: mod_base = OTHER; note = 2'-O-methyl modified nucleotide
  modified_base 12: mod_base = OTHER; note = 2'-O-methyl modified nucleotide
  modified_base 13: mod_base = OTHER; note = 2'-O-methyl modified nucleotide
  modified_base 14: mod_base = OTHER; note = 2'-fluoro modified nucleotide
  modified_base 15: mod_base = OTHER; note = 2'-O-methyl modified nucleotide
  modified_base 16: mod_base = OTHER; note = 2'-fluoro modified nucleotide
  modified_base 17: mod_base = OTHER; note = 2'-O-methyl modified nucleotide
  modified_base 18: mod_base = OTHER; note = 2'-O-methyl modified nucleotide
  modified_base 19: mod_base = OTHER; note = 2'-O-methyl modified nucleotide with phosphorothioate linkage
  modified_base 20: mod_base = OTHER; note = 2'-O-methyl modified nucleotide with phosphorothioate linkage
  modified_base 21: mod_base = OTHER; note = 2'-O-methyl modified nucleotide
tttctgatagatgtactggaa

SEQ ID NO: 338 - RNA, 21 nt, synthetic construct
  source 1..21: mol_type = other RNA
  modified_base 1: mod_base = OTHER; note = Vinyl-phosphonate 2'-O-methyl modified nucleotide with phosphorothioate linkage
  modified_base 2: mod_base = OTHER; note = 2'-fluoro modified nucleotide with phosphorothioate linkage
  modified_base 3: mod_base = OTHER; note = 2'-O-methyl modified nucleotide
  modified_base 4: mod_base = OTHER; note = 2'-O-methyl modified nucleotide
  modified_base 5: mod_base = OTHER; note = 2'-O-methyl modified nucleotide
  modified_base 6: mod_base = OTHER; note = 2'-fluoro modified nucleotide
  modified_base 7: mod_base = OTHER; note = 2'-O-methyl modified nucleotide
  modified_base 8: mod_base = OTHER; note = 2'-O-methyl modified nucleotide
  modified_base 9: mod_base = OTHER; note = 2'-O-methyl modified nucleotide
  modified_base 10: mod_base = OTHER; note = 2'-O-methyl modified nucleotide
  modified_base 11: mod_base = OTHER; note = 2'-O-methyl modified nucleotide
  modified_base 12: mod_base = OTHER; note = 2'-O-methyl modified nucleotide
  modified_base 13: mod_base = OTHER; note = 2'-O-methyl modified nucleotide
  modified_base 14: mod_base = OTHER; note = 2'-fluoro modified nucleotide
  modified_base 15: mod_base = OTHER; note = 2'-O-methyl modified nucleotide
  modified_base 16: mod_base = OTHER; note = 2'-fluoro modified nucleotide
  modified_base 17: mod_base = OTHER; note = 2'-O-methyl modified nucleotide
  modified_base 18: mod_base = OTHER; note = 2'-O-methyl modified nucleotide
  modified_base 19: mod_base = OTHER; note = 2'-O-methyl modified nucleotide with phosphorothioate linkage
  modified_base 20: mod_base = OTHER; note = 2'-O-methyl modified nucleotide with phosphorothioate linkage
  modified_base 21: mod_base = OTHER; note = 2'-O-methyl modified nucleotide
tttgatgattctgatagatgt

SEQ ID NO: 339 - RNA, 21 nt, synthetic construct
  source 1..21: mol_type = other RNA
  modified_base 1: mod_base = OTHER; note = Vinyl-phosphonate 2'-O-methyl modified nucleotide with phosphorothioate linkage
  modified_base 2: mod_base = OTHER; note = 2'-fluoro modified nucleotide with phosphorothioate linkage
  modified_base 3: mod_base = OTHER; note = 2'-O-methyl modified nucleotide
  modified_base 4: mod_base = OTHER; note = 2'-O-methyl modified nucleotide
  modified_base 5: mod_base = OTHER; note = 2'-O-methyl modified nucleotide
  modified_base 6: mod_base = OTHER; note = 2'-fluoro modified nucleotide
  modified_base 7: mod_base = OTHER; note = 2'-O-methyl modified nucleotide
  modified_base 8: mod_base = OTHER; note = 2'-O-methyl modified nucleotide
  modified_base 9: mod_base = OTHER; note = 2'-O-methyl modified nucleotide
  modified_base 10: mod_base = OTHER; note = 2'-O-methyl modified nucleotide
  modified_base 11: mod_base = OTHER; note = 2'-O-methyl modified nucleotide
  modified_base 12: mod_base = OTHER; note = 2'-O-methyl modified nucleotide
  modified_base 13: mod_base = OTHER; note = 2'-O-methyl modified nucleotide
  modified_base 14: mod_base = OTHER; note = 2'-fluoro modified nucleotide
  modified_base 15: mod_base = OTHER; note = 2'-O-methyl modified nucleotide
  modified_base 16: mod_base = OTHER; note = 2'-fluoro modified nucleotide
  modified_base 17: mod_base = OTHER; note = 2'-O-methyl modified nucleotide
  modified_base 18: mod_base = OTHER; note = 2'-O-methyl modified nucleotide
  modified_base 19: mod_base = OTHER; note = 2'-O-methyl modified nucleotide with phosphorothioate linkage
  modified_base 20: mod_base = OTHER; note = 2'-O-methyl modified nucleotide with phosphorothioate linkage
  modified_base 21: mod_base = OTHER; note = 2'-O-methyl modified nucleotide
ttcaggaattgagtgacttta

SEQ ID NO: 340 - RNA, 21 nt, synthetic construct
  source 1..21: mol_type = other RNA
  modified_base 1: mod_base = OTHER; note = Vinyl-phosphonate 2'-O-methyl modified nucleotide with phosphorothioate linkage
  modified_base 2: mod_base = OTHER; note = 2'-fluoro modified nucleotide with phosphorothioate linkage
  modified_base 3: mod_base = OTHER; note = 2'-O-methyl modified nucleotide
  modified_base 4: mod_base = OTHER; note = 2'-O-methyl modified nucleotide
  modified_base 5: mod_base = OTHER; note = 2'-O-methyl modified nucleotide
  modified_base 6: mod_base = OTHER; note = 2'-fluoro modified nucleotide
  modified_base 7: mod_base = OTHER; note = 2'-O-methyl modified nucleotide
  modified_base 8: mod_base = OTHER; note = 2'-O-methyl modified nucleotide
  modified_base 9: mod_base = OTHER; note = 2'-O-methyl modified nucleotide
  modified_base 10: mod_base = OTHER; note = 2'-O-methyl modified nucleotide
  modified_base 11: mod_base = OTHER; note = 2'-O-methyl modified nucleotide
  modified_base 12: mod_base = OTHER; note = 2'-O-methyl modified nucleotide
  modified_base 13: mod_base = OTHER; note = 2'-O-methyl modified nucleotide
  modified_base 14: mod_base = OTHER; note = 2'-fluoro modified nucleotide
  modified_base 15: mod_base = OTHER; note = 2'-O-methyl modified nucleotide
  modified_base 16: mod_base = OTHER; note = 2'-fluoro modified nucleotide
  modified_base 17: mod_base = OTHER; note = 2'-O-methyl modified nucleotide
  modified_base 18: mod_base = OTHER; note = 2'-O-methyl modified nucleotide
  modified_base 19: mod_base = OTHER; note = 2'-O-methyl modified nucleotide with phosphorothioate linkage
  modified_base 20: mod_base = OTHER; note = 2'-O-methyl modified nucleotide with phosphorothioate linkage
  modified_base 21: mod_base = OTHER; note = 2'-O-methyl modified nucleotide
ttatattgattagttcaggaa

SEQ ID NO: 341 - RNA, 21 nt, synthetic construct
  source 1..21: mol_type = other RNA
  modified_base 1: mod_base = OTHER; note = Vinyl-phosphonate 2'-O-methyl modified nucleotide with phosphorothioate linkage
  modified_base 2: mod_base = OTHER; note = 2'-fluoro modified nucleotide with phosphorothioate linkage
  modified_base 3: mod_base = OTHER; note = 2'-O-methyl modified nucleotide
  modified_base 4: mod_base = OTHER; note = 2'-O-methyl modified nucleotide
  modified_base 5: mod_base = OTHER; note = 2'-O-methyl modified nucleotide
  modified_base 6: mod_base = OTHER; note = 2'-fluoro modified nucleotide
  modified_base 7: mod_base = OTHER; note = 2'-O-methyl modified nucleotide
  modified_base 8: mod_base = OTHER; note = 2'-O-methyl modified nucleotide
  modified_base 9: mod_base = OTHER; note = 2'-O-methyl modified nucleotide
  modified_base 10: mod_base = OTHER; note = 2'-O-methyl modified nucleotide
  modified_base 11: mod_base = OTHER; note = 2'-O-methyl modified nucleotide
  modified_base 12: mod_base = OTHER; note = 2'-O-methyl modified nucleotide
  modified_base 13: mod_base = OTHER; note = 2'-O-methyl modified nucleotide
  modified_base 14: mod_base = OTHER; note = 2'-fluoro modified nucleotide
  modified_base 15: mod_base = OTHER; note = 2'-O-methyl modified nucleotide
  modified_base 16: mod_base = OTHER; note = 2'-fluoro modified nucleotide
  modified_base 17: mod_base = OTHER; note = 2'-O-methyl modified nucleotide
  modified_base 18: mod_base = OTHER; note = 2'-O-methyl modified nucleotide
  modified_base 19: mod_base = OTHER; note = 2'-O-methyl modified nucleotide with phosphorothioate linkage
  modified_base 20: mod_base = OTHER; note = 2'-O-methyl modified nucleotide with phosphorothioate linkage
  modified_base 21: mod_base = OTHER; note = 2'-O-methyl modified nucleotide
ttatatattgattagttcagg

SEQ ID NO: 342 - RNA, 21 nt, synthetic construct
  source 1..21: mol_type = other RNA
  modified_base 1: mod_base = OTHER; note = Vinyl-phosphonate 2'-O-methyl modified nucleotide with phosphorothioate linkage
  modified_base 2: mod_base = OTHER; note = 2'-fluoro modified nucleotide with phosphorothioate linkage
  modified_base 3: mod_base = OTHER; note = 2'-O-methyl modified nucleotide
  modified_base 4: mod_base = OTHER; note = 2'-O-methyl modified nucleotide
  modified_base 5: mod_base = OTHER; note = 2'-O-methyl modified nucleotide
  modified_base 6: mod_base = OTHER; note = 2'-fluoro modified nucleotide
  modified_base 7: mod_base = OTHER; note = 2'-O-methyl modified nucleotide
  modified_base 8: mod_base = OTHER; note = 2'-O-methyl modified nucleotide
  modified_base 9: mod_base = OTHER; note = 2'-O-methyl modified nucleotide
  modified_base 10: mod_base = OTHER; note = 2'-O-methyl modified nucleotide
  modified_base 11: mod_base = OTHER; note = 2'-O-methyl modified nucleotide
  modified_base 12: mod_base = OTHER; note = 2'-O-methyl modified nucleotide
  modified_base 13: mod_base = OTHER; note = 2'-O-methyl modified nucleotide
  modified_base 14: mod_base = OTHER; note = 2'-fluoro modified nucleotide
  modified_base 15: mod_base = OTHER; note = 2'-O-methyl modified nucleotide
  modified_base 16: mod_base = OTHER; note = 2'-fluoro modified nucleotide
  modified_base 17: mod_base = OTHER; note = 2'-O-methyl modified nucleotide
  modified_base 18: mod_base = OTHER; note = 2'-O-methyl modified nucleotide
  modified_base 19: mod_base = OTHER; note = 2'-O-methyl modified nucleotide with phosphorothioate linkage
  modified_base 20: mod_base = OTHER; note = 2'-O-methyl modified nucleotide with phosphorothioate linkage
  modified_base 21: mod_base = OTHER; note = 2'-O-methyl modified nucleotide
ttgcaaggaatgagaaccagg

SEQ ID NO: 343 - RNA, 21 nt, synthetic construct
  source 1..21: mol_type = other RNA
  modified_base 1: mod_base = OTHER; note = Vinyl-phosphonate 2'-O-methyl modified nucleotide with phosphorothioate linkage
  modified_base 2: mod_base = OTHER; note = 2'-fluoro modified nucleotide with phosphorothioate linkage
  modified_base 3: mod_base = OTHER; note = 2'-O-methyl modified nucleotide
  modified_base 4: mod_base = OTHER; note = 2'-O-methyl modified nucleotide
  modified_base 5: mod_base = OTHER; note = 2'-O-methyl modified nucleotide
  modified_base 6: mod_base = OTHER; note = 2'-fluoro modified nucleotide
  modified_base 7: mod_base = OTHER; note = 2'-O-methyl modified nucleotide
  modified_base 8: mod_base = OTHER; note = 2'-O-methyl modified nucleotide
  modified_base 9: mod_base = OTHER; note = 2'-O-methyl modified nucleotide
  modified_base 10: mod_base = OTHER; note = 2'-O-methyl modified nucleotide
  modified_base 11: mod_base = OTHER; note = 2'-O-methyl modified nucleotide
  modified_base 12: mod_base = OTHER; note = 2'-O-methyl modified nucleotide
  modified_base 13: mod_base = OTHER; note = 2'-O-methyl modified nucleotide
  modified_base 14: mod_base = OTHER; note = 2'-fluoro modified nucleotide
  modified_base 15: mod_base = OTHER; note = 2'-O-methyl modified nucleotide
  modified_base 16: mod_base = OTHER; note = 2'-fluoro modified nucleotide
  modified_base 17: mod_base = OTHER; note = 2'-O-methyl modified nucleotide
  modified_base 18: mod_base = OTHER; note = 2'-O-methyl modified nucleotide
  modified_base 19: mod_base = OTHER; note = 2'-O-methyl modified nucleotide with phosphorothioate linkage
  modified_base 20: mod_base = OTHER; note = 2'-O-methyl modified nucleotide with phosphorothioate linkage
  modified_base 21: mod_base = OTHER; note = 2'-O-methyl modified nucleotide
ttatggtgcaaggaatgagaa

SEQ ID NO: 344 - RNA, 21 nt, synthetic construct
  source 1..21: mol_type = other RNA
  modified_base 1: mod_base = OTHER; note = Vinyl-phosphonate 2'-O-methyl modified nucleotide with phosphorothioate linkage
  modified_base 2: mod_base = OTHER; note = 2'-fluoro modified nucleotide with phosphorothioate linkage
  modified_base 3: mod_base = OTHER; note = 2'-O-methyl modified nucleotide
  modified_base 4: mod_base = OTHER; note = 2'-O-methyl modified nucleotide
  modified_base 5: mod_base = OTHER; note = 2'-O-methyl modified nucleotide
  modified_base 6: mod_base = OTHER; note = 2'-fluoro modified nucleotide
  modified_base 7: mod_base = OTHER; note = 2'-O-methyl modified nucleotide
  modified_base 8: mod_base = OTHER; note = 2'-O-methyl modified nucleotide
  modified_base 9: mod_base = OTHER; note = 2'-O-methyl modified nucleotide
  modified_base 10: mod_base = OTHER; note = 2'-O-methyl modified nucleotide
  modified_base 11: mod_base = OTHER; note = 2'-O-methyl modified nucleotide
  modified_base 12: mod_base = OTHER; note = 2'-O-methyl modified nucleotide
  modified_base 13: mod_base = OTHER; note = 2'-O-methyl modified nucleotide
  modified_base 14: mod_base = OTHER; note = 2'-fluoro modified nucleotide
  modified_base 15: mod_base = OTHER; note = 2'-O-methyl modified nucleotide
  modified_base 16: mod_base = OTHER; note = 2'-fluoro modified nucleotide
  modified_base 17: mod_base = OTHER; note = 2'-O-methyl modified nucleotide
  modified_base 18: mod_base = OTHER; note = 2'-O-methyl modified nucleotide
  modified_base 19: mod_base = OTHER; note = 2'-O-methyl modified nucleotide with phosphorothioate linkage
  modified_base 20: mod_base = OTHER; note = 2'-O-methyl modified nucleotide with phosphorothioate linkage
  modified_base 21: mod_base = OTHER; note = 2'-O-methyl modified nucleotide
taacccagcagaaagccaata

SEQ ID NO: 345 - RNA, 21 nt, synthetic construct
  source 1..21: mol_type = other RNA
  modified_base 1: mod_base = OTHER; note = Vinyl-phosphonate 2'-O-methyl modified nucleotide with phosphorothioate linkage
  modified_base 2: mod_base = OTHER; note = 2'-fluoro modified nucleotide with phosphorothioate linkage
  modified_base 3: mod_base = OTHER; note = 2'-O-methyl modified nucleotide
  modified_base 4: mod_base = OTHER; note = 2'-O-methyl modified nucleotide
  modified_base 5: mod_base = OTHER; note = 2'-O-methyl modified nucleotide
  modified_base 6: mod_base = OTHER; note = 2'-fluoro modified nucleotide
  modified_base 7: mod_base = OTHER; note = 2'-O-methyl modified nucleotide
  modified_base 8: mod_base = OTHER; note = 2'-O-methyl modified nucleotide
  modified_base 9: mod_base = OTHER; note = 2'-O-methyl modified nucleotide
  modified_base 10: mod_base = OTHER; note = 2'-O-methyl modified nucleotide
  modified_base 11: mod_base = OTHER; note = 2'-O-methyl modified nucleotide
  modified_base 12: mod_base = OTHER; note = 2'-O-methyl modified nucleotide
  modified_base 13: mod_base = OTHER; note = 2'-O-methyl modified nucleotide
  modified_base 14: mod_base = OTHER; note = 2'-fluoro modified nucleotide
  modified_base 15: mod_base = OTHER; note = 2'-O-methyl modified nucleotide
  modified_base 16: mod_base = OTHER; note = 2'-fluoro modified nucleotide
  modified_base 17: mod_base = OTHER; note = 2'-O-methyl modified nucleotide
  modified_base 18: mod_base = OTHER; note = 2'-O-methyl modified nucleotide
  modified_base 19: mod_base = OTHER; note = 2'-O-methyl modified nucleotide with phosphorothioate linkage
  modified_base 20: mod_base = OTHER; note = 2'-O-methyl modified nucleotide with phosphorothioate linkage
  modified_base 21: mod_base = OTHER; note = 2'-O-methyl modified nucleotide
tggaaaatcatgtagaggagg

SEQ ID NO: 346 - RNA, 23 nt, synthetic construct
  source 1..23: mol_type = other RNA
  modified_base 1: mod_base = OTHER; note = Vinyl-phosphonate 2'-O-methyl modified nucleotide with phosphorothioate linkage
  modified_base 2: mod_base = OTHER; note = 2'-fluoro modified nucleotide with phosphorothioate linkage
  modified_base 3: mod_base = OTHER; note = 2'-O-methyl modified nucleotide
  modified_base 4: mod_base = OTHER; note = 2'-O-methyl modified nucleotide
  modified_base 5: mod_base = OTHER; note = 2'-O-methyl modified nucleotide
  modified_base 6: mod_base = OTHER; note = 2'-fluoro modified nucleotide
  modified_base 7: mod_base = OTHER; note = 2'-O-methyl modified nucleotide
  modified_base 8: mod_base = OTHER; note = 2'-fluoro modified nucleotide
  modified_base 9: mod_base = OTHER; note = 2'-fluoro modified nucleotide
  modified_base 10: mod_base = OTHER; note = 2'-O-methyl modified nucleotide
  modified_base 11: mod_base = OTHER; note = 2'-O-methyl modified nucleotide
  modified_base 12: mod_base = OTHER; note = 2'-O-methyl modified nucleotide
  modified_base 13: mod_base = OTHER; note = 2'-O-methyl modified nucleotide
  modified_base 14: mod_base = OTHER; note = 2'-fluoro modified nucleotide
  modified_base 15: mod_base = OTHER; note = 2'-O-methyl modified nucleotide
  modified_base 16: mod_base = OTHER; note = 2'-fluoro modified nucleotide
  modified_base 17: mod_base = OTHER; note = 2'-O-methyl modified nucleotide
  modified_base 18: mod_base = OTHER; note = 2'-O-methyl modified nucleotide
  modified_base 19: mod_base = OTHER; note = 2'-O-methyl modified nucleotide
  modified_base 20: mod_base = OTHER; note = 2'-O-methyl modified nucleotide
  modified_base 21: mod_base = OTHER; note = 2'-O-methyl modified nucleotide with phosphorothioate linkage
  modified_base 22: mod_base = OTHER; note = 2'-O-methyl modified nucleotide with phosphorothioate linkage
  modified_base 23: mod_base = OTHER; note = 2'-O-methyl modified nucleotide
tataagtgagccttgatcttgct

SEQ ID NO: 347 - RNA, 23 nt, synthetic construct
  source 1..23: mol_type = other RNA
  modified_base 1: mod_base = OTHER; note = Vinyl-phosphonate 2'-O-methyl modified nucleotide with phosphorothioate linkage
  modified_base 2: mod_base = OTHER; note = 2'-fluoro modified nucleotide with phosphorothioate linkage
  modified_base 3: mod_base = OTHER; note = 2'-O-methyl modified nucleotide
  modified_base 4: mod_base = OTHER; note = 2'-O-methyl modified nucleotide
  modified_base 5: mod_base = OTHER; note = 2'-O-methyl modified nucleotide
  modified_base 6: mod_base = OTHER; note = 2'-fluoro modified nucleotide
  modified_base 7: mod_base = OTHER; note = 2'-O-methyl modified nucleotide
  modified_base 8: mod_base = OTHER; note = 2'-fluoro modified nucleotide
  modified_base 9: mod_base = OTHER; note = 2'-fluoro modified nucleotide
  modified_base 10: mod_base = OTHER; note = 2'-O-methyl modified nucleotide
  modified_base 11: mod_base = OTHER; note = 2'-O-methyl modified nucleotide
  modified_base 12: mod_base = OTHER; note = 2'-O-methyl modified nucleotide
  modified_base 13: mod_base = OTHER; note = 2'-O-methyl modified nucleotide
  modified_base 14: mod_base = OTHER; note = 2'-fluoro modified nucleotide
  modified_base 15: mod_base = OTHER; note = 2'-O-methyl modified nucleotide
  modified_base 16: mod_base = OTHER; note = 2'-fluoro modified nucleotide
  modified_base 17: mod_base = OTHER; note = 2'-O-methyl modified nucleotide
  modified_base 18: mod_base = OTHER; note = 2'-O-methyl modified nucleotide
  modified_base 19: mod_base = OTHER; note = 2'-O-methyl modified nucleotide
  modified_base 20: mod_base = OTHER; note = 2'-O-methyl modified nucleotide
  modified_base 21: mod_base = OTHER; note = 2'-O-methyl modified nucleotide with phosphorothioate linkage
  modified_base 22: mod_base = OTHER; note = 2'-O-methyl modified nucleotide with phosphorothioate linkage
  modified_base 23: mod_base = OTHER; note = 2'-O-methyl modified nucleotide
ttggtcatcacaatgctgaggtt

SEQ ID NO: 348 - RNA, 23 nt, synthetic construct
  source 1..23: mol_type = other RNA
  modified_base 1: mod_base = OTHER; note = Vinyl-phosphonate 2'-O-methyl modified nucleotide with phosphorothioate linkage
  modified_base 2: mod_base = OTHER; note = 2'-fluoro modified nucleotide with phosphorothioate linkage
  modified_base 3: mod_base = OTHER; note = 2'-O-methyl modified nucleotide
  modified_base 4: mod_base = OTHER; note = 2'-O-methyl modified nucleotide
  modified_base 5: mod_base = OTHER; note = 2'-O-methyl modified nucleotide
  modified_base 6: mod_base = OTHER; note = 2'-fluoro modified nucleotide
  modified_base 7: mod_base = OTHER; note = 2'-O-methyl modified nucleotide
  modified_base 8: mod_base = OTHER; note = 2'-fluoro modified nucleotide
  modified_base 9: mod_base = OTHER; note = 2'-fluoro modified nucleotide
  modified_base 10: mod_base = OTHER; note = 2'-O-methyl modified nucleotide
  modified_base 11: mod_base = OTHER; note = 2'-O-methyl modified nucleotide
  modified_base 12: mod_base = OTHER; note = 2'-O-methyl modified nucleotide
  modified_base 13: mod_base = OTHER; note = 2'-O-methyl modified nucleotide
  modified_base 14: mod_base = OTHER; note = 2'-fluoro modified nucleotide
  modified_base 15: mod_base = OTHER; note = 2'-O-methyl modified nucleotide
  modified_base 16: mod_base = OTHER; note = 2'-fluoro modified nucleotide
  modified_base 17: mod_base = OTHER; note = 2'-O-methyl modified nucleotide
  modified_base 18: mod_base = OTHER; note = 2'-O-methyl modified nucleotide
  modified_base 19: mod_base = OTHER; note = 2'-O-methyl modified nucleotide
  modified_base 20: mod_base = OTHER; note = 2'-O-methyl modified nucleotide
  modified_base 21: mod_base = OTHER; note = 2'-O-methyl modified nucleotide with phosphorothioate linkage
  modified_base 22: mod_base = OTHER; note = 2'-O-methyl modified nucleotide with phosphorothioate linkage
  modified_base 23: mod_base = OTHER; note = 2'-O-methyl modified nucleotide
ttgcacaagagaatgatgatcat

SEQ ID NO: 349 - RNA, 23 nt, synthetic construct
  source 1..23: mol_type = other RNA
  modified_base 1: mod_base = OTHER; note = Vinyl-phosphonate 2'-O-methyl modified nucleotide with phosphorothioate linkage
  modified_base 2: mod_base = OTHER; note = 2'-fluoro modified nucleotide with phosphorothioate linkage
  modified_base 3: mod_base = OTHER; note = 2'-O-methyl modified nucleotide
  modified_base 4: mod_base = OTHER; note = 2'-O-methyl modified nucleotide
  modified_base 5: mod_base = OTHER; note = 2'-O-methyl modified nucleotide
  modified_base 6: mod_base = OTHER; note = 2'-fluoro modified nucleotide
  modified_base 7: mod_base = OTHER; note = 2'-O-methyl modified nucleotide
  modified_base 8: mod_base = OTHER; note = 2'-fluoro modified nucleotide
  modified_base 9: mod_base = OTHER; note = 2'-fluoro modified nucleotide
  modified_base 10: mod_base = OTHER; note = 2'-O-methyl modified nucleotide
  modified_base 11: mod_base = OTHER; note = 2'-O-methyl modified nucleotide
  modified_base 12: mod_base = OTHER; note = 2'-O-methyl modified nucleotide
  modified_base 13: mod_base = OTHER; note = 2'-O-methyl modified nucleotide
  modified_base 14: mod_base = OTHER; note = 2'-fluoro modified nucleotide
  modified_base 15: mod_base = OTHER; note = 2'-O-methyl modified nucleotide
  modified_base 16: mod_base = OTHER; note = 2'-fluoro modified nucleotide
  modified_base 17: mod_base = OTHER; note = 2'-O-methyl modified nucleotide
  modified_base 18: mod_base = OTHER; note = 2'-O-methyl modified nucleotide
  modified_base 19: mod_base = OTHER; note = 2'-O-methyl modified nucleotide
  modified_base 20: mod_base = OTHER; note = 2'-O-methyl modified nucleotide
  modified_base 21: mod_base = OTHER; note = 2'-O-methyl modified nucleotide with phosphorothioate linkage
  modified_base 22: mod_base = OTHER; note = 2'-O-methyl modified nucleotide with phosphorothioate linkage
  modified_base 23: mod_base = OTHER; note = 2'-O-methyl modified nucleotide
tagagaactgtgacggccacact

SEQ ID NO: 350 - RNA, 23 nt, synthetic construct
  source 1..23: mol_type = other RNA
  modified_base 1: mod_base = OTHER; note = Vinyl-phosphonate 2'-O-methyl modified nucleotide with phosphorothioate linkage
  modified_base 2: mod_base = OTHER; note = 2'-fluoro modified nucleotide with phosphorothioate linkage
  modified_base 3: mod_base = OTHER; note = 2'-O-methyl modified nucleotide
  modified_base 4: mod_base = OTHER; note = 2'-O-methyl modified nucleotide
  modified_base 5: mod_base = OTHER; note = 2'-O-methyl modified nucleotide
  modified_base 6: mod_base = OTHER; note = 2'-fluoro modified nucleotide
  modified_base 7: mod_base = OTHER; note = 2'-O-methyl modified nucleotide
  modified_base 8: mod_base = OTHER; note = 2'-fluoro modified nucleotide
  modified_base 9: mod_base = OTHER; note = 2'-fluoro modified nucleotide
  modified_base 10: mod_base = OTHER; note = 2'-O-methyl modified nucleotide
  modified_base 11: mod_base = OTHER; note = 2'-O-methyl modified nucleotide
  modified_base 12: mod_base = OTHER; note = 2'-O-methyl modified nucleotide
  modified_base 13: mod_base = OTHER; note = 2'-O-methyl modified nucleotide
  modified_base 14: mod_base = OTHER; note = 2'-fluoro modified nucleotide
  modified_base 15: mod_base = OTHER; note = 2'-O-methyl modified nucleotide
  modified_base 16: mod_base = OTHER; note = 2'-fluoro modified nucleotide
  modified_base 17: mod_base = OTHER; note = 2'-O-methyl modified nucleotide
  modified_base 18: mod_base = OTHER; note = 2'-O-methyl modified nucleotide
  modified_base 19: mod_base = OTHER; note = 2'-O-methyl modified nucleotide
  modified_base 20: mod_base = OTHER; note = 2'-O-methyl modified nucleotide
  modified_base 21: mod_base = OTHER; note = 2'-O-methyl modified nucleotide with phosphorothioate linkage
  modified_base 22: mod_base = OTHER; note = 2'-O-methyl modified nucleotide with phosphorothioate linkage
  modified_base 23: mod_base = OTHER; note = 2'-O-methyl modified nucleotide
tagaattgctttgggaccagaat

SEQ ID NO: 351 - RNA, 23 nt, synthetic construct
  source 1..23: mol_type = other RNA
  modified_base 1: mod_base = OTHER; note = Vinyl-phosphonate 2'-O-methyl modified nucleotide with phosphorothioate linkage
  modified_base 2: mod_base = OTHER; note = 2'-fluoro modified nucleotide with phosphorothioate linkage
  modified_base 3: mod_base = OTHER; note = 2'-O-methyl modified nucleotide
  modified_base 4: mod_base = OTHER; note = 2'-O-methyl modified nucleotide
  modified_base 5: mod_base = OTHER; note = 2'-O-methyl modified nucleotide
  modified_base 6: mod_base = OTHER; note = 2'-fluoro modified nucleotide
  modified_base 7: mod_base = OTHER; note = 2'-O-methyl modified nucleotide
  modified_base 8: mod_base = OTHER; note = 2'-fluoro modified nucleotide
  modified_base 9: mod_base = OTHER; note = 2'-fluoro modified nucleotide
  modified_base 10: mod_base = OTHER; note = 2'-O-methyl modified nucleotide
  modified_base 11: mod_base = OTHER; note = 2'-O-methyl modified nucleotide
  modified_base 12: mod_base = OTHER; note = 2'-O-methyl modified nucleotide
  modified_base 13: mod_base = OTHER; note = 2'-O-methyl modified nucleotide
  modified_base 14: mod_base = OTHER; note = 2'-fluoro modified nucleotide
  modified_base 15: mod_base = OTHER; note = 2'-O-methyl modified nucleotide
  modified_base 16: mod_base = OTHER; note = 2'-fluoro modified nucleotide
  modified_base 17: mod_base = OTHER; note = 2'-O-methyl modified nucleotide
  modified_base 18: mod_base = OTHER; note = 2'-O-methyl modified nucleotide
  modified_base 19: mod_base = OTHER; note = 2'-O-methyl modified nucleotide
  modified_base 20: mod_base = OTHER; note = 2'-O-methyl modified nucleotide
  modified_base 21: mod_base = OTHER; note = 2'-O-methyl modified nucleotide with phosphorothioate linkage
  modified_base 22: mod_base = OTHER; note = 2'-O-methyl modified nucleotide with phosphorothioate linkage
  modified_base 23: mod_base = OTHER; note = 2'-O-methyl modified nucleotide
ttctgatagatgtactggaaatg

SEQ ID NO: 352 - RNA, 23 nt, synthetic construct
  source 1..23: mol_type = other RNA
  modified_base 1: mod_base = OTHER; note = Vinyl-phosphonate 2'-O-methyl modified nucleotide with phosphorothioate linkage
  modified_base 2: mod_base = OTHER; note = 2'-fluoro modified nucleotide with phosphorothioate linkage
  modified_base 3: mod_base = OTHER; note = 2'-O-methyl modified nucleotide
  modified_base 4: mod_base = OTHER; note = 2'-O-methyl modified nucleotide
  modified_base 5: mod_base = OTHER; note = 2'-O-methyl modified nucleotide
  modified_base 6: mod_base = OTHER; note = 2'-fluoro modified nucleotide
  modified_base 7: mod_base = OTHER; note = 2'-O-methyl modified nucleotide
  modified_base 8: mod_base = OTHER; note = 2'-fluoro modified nucleotide
  modified_base 9: mod_base = OTHER; note = 2'-fluoro modified nucleotide
  modified_base 10: mod_base = OTHER; note = 2'-O-methyl modified nucleotide
  modified_base 11: mod_base = OTHER; note = 2'-O-methyl modified nucleotide
  modified_base 12: mod_base = OTHER; note = 2'-O-methyl modified nucleotide
  modified_base 13: mod_base = OTHER; note = 2'-O-methyl modified nucleotide
  modified_base 14: mod_base = OTHER; note = 2'-fluoro modified nucleotide
  modified_base 15: mod_base = OTHER; note = 2'-O-methyl modified nucleotide
  modified_base 16: mod_base = OTHER; note = 2'-fluoro modified nucleotide
  modified_base 17: mod_base = OTHER; note = 2'-O-methyl modified nucleotide
  modified_base 18: mod_base = OTHER; note = 2'-O-methyl modified nucleotide
  modified_base 19: mod_base = OTHER; note = 2'-O-methyl modified nucleotide
  modified_base 20: mod_base = OTHER; note = 2'-O-methyl modified nucleotide
  modified_base 21: mod_base = OTHER; note = 2'-O-methyl modified nucleotide with phosphorothioate linkage
  modified_base 22: mod_base = OTHER; note = 2'-O-methyl modified nucleotide with phosphorothioate linkage
  modified_base 23: mod_base = OTHER; note = 2'-O-methyl modified nucleotide
tttctgatagatgtactggaaat

SEQ ID NO: 353 - RNA, 23 nt, synthetic construct
  source 1..23: mol_type = other RNA
  modified_base 1: mod_base = OTHER; note = Vinyl-phosphonate 2'-O-methyl modified nucleotide with phosphorothioate linkage
  modified_base 2: mod_base = OTHER; note = 2'-fluoro modified nucleotide with phosphorothioate linkage
  modified_base 3: mod_base = OTHER; note = 2'-O-methyl modified nucleotide
  modified_base 4: mod_base = OTHER; note = 2'-O-methyl modified nucleotide
  modified_base 5: mod_base = OTHER; note = 2'-O-methyl modified nucleotide
  modified_base 6: mod_base = OTHER; note = 2'-fluoro modified nucleotide
  modified_base 7: mod_base = OTHER; note = 2'-O-methyl modified nucleotide
  modified_base 8: mod_base = OTHER; note = 2'-fluoro modified nucleotide
  modified_base 9: mod_base = OTHER; note = 2'-fluoro modified nucleotide
  modified_base 10: mod_base = OTHER; note = 2'-O-methyl modified nucleotide
  modified_base 11: mod_base = OTHER; note = 2'-O-methyl modified nucleotide
  modified_base 12: mod_base = OTHER; note = 2'-O-methyl modified nucleotide
  modified_base 13: mod_base = OTHER; note = 2'-O-methyl modified nucleotide
  modified_base 14: mod_base = OTHER; note = 2'-fluoro modified nucleotide
  modified_base 15: mod_base = OTHER; note = 2'-O-methyl modified nucleotide
  modified_base 16: mod_base = OTHER; note = 2'-fluoro modified nucleotide
  modified_base 17: mod_base = OTHER; note = 2'-O-methyl modified nucleotide
  modified_base 18: mod_base = OTHER; note = 2'-O-methyl modified nucleotide
  modified_base 19: mod_base = OTHER; note = 2'-O-methyl modified nucleotide
  modified_base 20: mod_base = OTHER; note = 2'-O-methyl modified nucleotide
  modified_base 21: mod_base = OTHER; note = 2'-O-methyl modified nucleotide with phosphorothioate linkage
  modified_base 22: mod_base = OTHER; note = 2'-O-methyl modified nucleotide with phosphorothioate linkage
  modified_base 23: mod_base = OTHER; note = 2'-O-methyl modified nucleotide
tttgatgattctgatagatgtac

SEQ ID NO: 354 - RNA, 23 nt, synthetic construct
  source 1..23: mol_type = other RNA
  modified_base 1: mod_base = OTHER; note = Vinyl-phosphonate 2'-O-methyl modified nucleotide with phosphorothioate linkage
  modified_base 2: mod_base = OTHER; note = 2'-fluoro modified nucleotide with phosphorothioate linkage
  modified_base 3: mod_base = OTHER; note = 2'-O-methyl modified nucleotide
  modified_base 4: mod_base = OTHER; note = 2'-O-methyl modified nucleotide
  modified_base 5: mod_base = OTHER; note = 2'-O-methyl modified nucleotide
  modified_base 6: mod_base = OTHER; note = 2'-fluoro modified nucleotide
  modified_base 7: mod_base = OTHER; note = 2'-O-methyl modified nucleotide
  modified_base 8: mod_base = OTHER; note = 2'-fluoro modified nucleotide
  modified_base 9: mod_base = OTHER; note = 2'-fluoro modified nucleotide
  modified_base 10: mod_base = OTHER; note = 2'-O-methyl modified nucleotide
  modified_base 11: mod_base = OTHER; note = 2'-O-methyl modified nucleotide
  modified_base 12: mod_base = OTHER; note = 2'-O-methyl modified nucleotide
  modified_base 13: mod_base = OTHER; note = 2'-O-methyl modified nucleotide
  modified_base 14: mod_base = OTHER; note = 2'-fluoro modified nucleotide
  modified_base 15: mod_base = OTHER; note = 2'-O-methyl modified nucleotide
  modified_base 16: mod_base = OTHER; note = 2'-fluoro modified nucleotide
  modified_base 17: mod_base = OTHER; note = 2'-O-methyl modified nucleotide
  modified_base 18: mod_base = OTHER; note = 2'-O-methyl modified nucleotide
  modified_base 19: mod_base = OTHER; note = 2'-O-methyl modified nucleotide
  modified_base 20: mod_base = OTHER; note = 2'-O-methyl modified nucleotide
  modified_base 21: mod_base = OTHER; note = 2'-O-methyl modified nucleotide with phosphorothioate linkage
  modified_base 22: mod_base = OTHER; note = 2'-O-methyl modified nucleotide with phosphorothioate linkage
  modified_base 23: mod_base = OTHER; note = 2'-O-methyl modified nucleotide
ttcaggaattgagtgactttaag

SEQ ID NO: 355 - RNA, 23 nt, synthetic construct
  source 1..23: mol_type = other RNA
  modified_base 1: mod_base = OTHER; note = Vinyl-phosphonate 2'-O-methyl modified nucleotide with phosphorothioate linkage
  modified_base 2: mod_base = OTHER; note = 2'-fluoro modified nucleotide with phosphorothioate linkage
  modified_base 3: mod_base = OTHER; note = 2'-O-methyl modified nucleotide
  modified_base 4: mod_base = OTHER; note = 2'-O-methyl modified nucleotide
  modified_base 5: mod_base = OTHER; note = 2'-O-methyl modified nucleotide
  modified_base 6: mod_base = OTHER; note = 2'-fluoro modified nucleotide
  modified_base 7: mod_base = OTHER; note = 2'-O-methyl modified nucleotide
  modified_base 8: mod_base = OTHER; note = 2'-fluoro modified nucleotide
  modified_base 9: mod_base = OTHER; note = 2'-fluoro modified nucleotide
  modified_base 10: mod_base = OTHER; note = 2'-O-methyl modified nucleotide
  modified_base 11: mod_base = OTHER; note = 2'-O-methyl modified nucleotide
  modified_base 12: mod_base = OTHER; note = 2'-O-methyl modified nucleotide
  modified_base 13: mod_base = OTHER; note = 2'-O-methyl modified nucleotide
  modified_base 14: mod_base = OTHER; note = 2'-fluoro modified nucleotide
  modified_base 15: mod_base = OTHER; note = 2'-O-methyl modified nucleotide
  modified_base 16: mod_base = OTHER; note = 2'-fluoro modified nucleotide
  modified_base 17: mod_base = OTHER; note = 2'-O-methyl modified nucleotide
  modified_base 18: mod_base = OTHER; note = 2'-O-methyl modified nucleotide
  modified_base 19: mod_base = OTHER; note = 2'-O-methyl modified nucleotide
  modified_base 20: mod_base = OTHER; note = 2'-O-methyl modified nucleotide
  modified_base 21: mod_base = OTHER; note = 2'-O-methyl modified nucleotide with phosphorothioate linkage
  modified_base 22: mod_base = OTHER; note = 2'-O-methyl modified nucleotide with phosphorothioate linkage
  modified_base 23: mod_base = OTHER; note = 2'-O-methyl modified nucleotide
ttatattgattagttcaggaatt

SEQ ID NO: 356 - RNA, 23 nt, synthetic construct
  source 1..23: mol_type = other RNA
  modified_base 1: mod_base = OTHER; note = Vinyl-phosphonate 2'-O-methyl modified nucleotide with phosphorothioate linkage
  modified_base 2: mod_base = OTHER; note = 2'-fluoro modified nucleotide with phosphorothioate linkage
  modified_base 3: mod_base = OTHER; note = 2'-O-methyl modified nucleotide
  modified_base 4: mod_base = OTHER; note = 2'-O-methyl modified nucleotide
  modified_base 5: mod_base = OTHER; note = 2'-O-methyl modified nucleotide
  modified_base 6: mod_base = OTHER; note = 2'-fluoro modified nucleotide
  modified_base 7: mod_base = OTHER; note = 2'-O-methyl modified nucleotide
  modified_base 8: mod_base = OTHER; note = 2'-fluoro modified nucleotide
  modified_base 9: mod_base = OTHER; note = 2'-fluoro modified nucleotide
  modified_base 10: mod_base = OTHER; note = 2'-O-methyl modified nucleotide
  modified_base 11: mod_base = OTHER; note = 2'-O-methyl modified nucleotide
  modified_base 12: mod_base = OTHER; note = 2'-O-methyl modified nucleotide
  modified_base 13: mod_base = OTHER; note = 2'-O-methyl modified nucleotide
  modified_base 14: mod_base = OTHER; note = 2'-fluoro modified nucleotide
  modified_base 15: mod_base = OTHER; note = 2'-O-methyl modified nucleotide
  modified_base 16: mod_base = OTHER; note = 2'-fluoro modified nucleotide
  modified_base 17: mod_base = OTHER; note = 2'-O-methyl modified nucleotide
  modified_base 18: mod_base = OTHER; note = 2'-O-methyl modified nucleotide
  modified_base 19: mod_base = OTHER; note = 2'-O-methyl modified nucleotide
  modified_base 20: mod_base = OTHER; note = 2'-O-methyl modified nucleotide
  modified_base 21: mod_base = OTHER; note = 2'-O-methyl modified nucleotide with phosphorothioate linkage
  modified_base 22: mod_base = OTHER; note = 2'-O-methyl modified nucleotide with phosphorothioate linkage
  modified_base 23: mod_base = OTHER; note = 2'-O-methyl modified nucleotide
ttatatattgattagttcaggaa

SEQ ID NO: 357 - RNA, 23 nt, synthetic construct
  source 1..23: mol_type = other RNA
  modified_base 1: mod_base = OTHER; note = Vinyl-phosphonate 2'-O-methyl modified nucleotide with phosphorothioate linkage
  modified_base 2: mod_base = OTHER; note = 2'-fluoro modified nucleotide with phosphorothioate linkage
  modified_base 3: mod_base = OTHER; note = 2'-O-methyl modified nucleotide
  modified_base 4: mod_base = OTHER; note = 2'-O-methyl modified nucleotide
  modified_base 5: mod_base = OTHER; note = 2'-O-methyl modified nucleotide
  modified_base 6: mod_base = OTHER; note = 2'-fluoro modified nucleotide
  modified_base 7: mod_base = OTHER; note = 2'-O-methyl modified nucleotide
  modified_base 8: mod_base = OTHER; note = 2'-fluoro modified nucleotide
  modified_base 9: mod_base = OTHER; note = 2'-fluoro modified nucleotide
  modified_base 10: mod_base = OTHER; note = 2'-O-methyl modified nucleotide
  modified_base 11: mod_base = OTHER; note = 2'-O-methyl modified nucleotide
  modified_base 12: mod_base = OTHER; note = 2'-O-methyl modified nucleotide
  modified_base 13: mod_base = OTHER; note = 2'-O-methyl modified nucleotide
  modified_base 14: mod_base = OTHER; note = 2'-fluoro modified nucleotide
  modified_base 15: mod_base = OTHER; note = 2'-O-methyl modified nucleotide
  modified_base 16: mod_base = OTHER; note = 2'-fluoro modified nucleotide
  modified_base 17: mod_base = OTHER; note = 2'-O-methyl modified nucleotide
  modified_base 18: mod_base = OTHER; note = 2'-O-methyl modified nucleotide
  modified_base 19: mod_base = OTHER; note = 2'-O-methyl modified nucleotide
  modified_base 20: mod_base = OTHER; note = 2'-O-methyl modified nucleotide
  modified_base 21: mod_base = OTHER; note = 2'-O-methyl modified nucleotide with phosphorothioate linkage
  modified_base 22: mod_base = OTHER; note = 2'-O-methyl modified nucleotide with phosphorothioate linkage
  modified_base 23: mod_base = OTHER; note = 2'-O-methyl modified nucleotide
ttgcaaggaatgagaaccaggac

SEQ ID NO: 358 - RNA, 23 nt, synthetic construct
  source 1..23: mol_type = other RNA
  modified_base 1: mod_base = OTHER; note = Vinyl-phosphonate 2'-O-methyl modified nucleotide with phosphorothioate linkage
  modified_base 2: mod_base = OTHER; note = 2'-fluoro modified nucleotide with phosphorothioate linkage
  modified_base 3: mod_base = OTHER; note = 2'-O-methyl modified nucleotide
  modified_base 4: mod_base = OTHER; note = 2'-O-methyl modified nucleotide
  modified_base 5: mod_base = OTHER; note = 2'-O-methyl modified nucleotide
  modified_base 6: mod_base = OTHER; note = 2'-fluoro modified nucleotide
  modified_base 7: mod_base = OTHER; note = 2'-O-methyl modified nucleotide
  modified_base 8: mod_base = OTHER; note = 2'-fluoro modified nucleotide
  modified_base 9: mod_base = OTHER; note = 2'-fluoro modified nucleotide
  modified_base 10: mod_base = OTHER; note = 2'-O-methyl modified nucleotide
  modified_base 11: mod_base = OTHER; note = 2'-O-methyl modified nucleotide
  modified_base 12: mod_base = OTHER; note = 2'-O-methyl modified nucleotide
  modified_base 13: mod_base = OTHER; note = 2'-O-methyl modified nucleotide
  modified_base 14: mod_base = OTHER; note = 2'-fluoro modified nucleotide
  modified_base 15: mod_base = OTHER; note = 2'-O-methyl modified nucleotide
  modified_base 16: mod_base = OTHER; note = 2'-fluoro modified nucleotide
  modified_base 17: mod_base = OTHER; note = 2'-O-methyl modified nucleotide
  modified_base 18: mod_base = OTHER; note = 2'-O-methyl modified nucleotide
  modified_base 19: mod_base = OTHER; note = 2'-O-methyl modified nucleotide
  modified_base 20: mod_base = OTHER; note = 2'-O-methyl modified nucleotide
  modified_base 21: mod_base = OTHER; note = 2'-O-methyl modified nucleotide with phosphorothioate linkage
  modified_base 22: mod_base = OTHER; note = 2'-O-methyl modified nucleotide with phosphorothioate linkage
  modified_base 23: mod_base = OTHER; note = 2'-O-methyl modified nucleotide
ttatggtgcaaggaatgagaacc

SEQ ID NO: 359 - RNA, 23 nt, synthetic construct
  source 1..23: mol_type = other RNA
  modified_base 1: mod_base = OTHER; note = Vinyl-phosphonate 2'-O-methyl modified nucleotide with phosphorothioate linkage
  modified_base 2: mod_base = OTHER; note = 2'-fluoro modified nucleotide with phosphorothioate linkage
  modified_base 3: mod_base = OTHER; note = 2'-O-methyl modified nucleotide
  modified_base 4: mod_base = OTHER; note = 2'-O-methyl modified nucleotide
  modified_base 5: mod_base = OTHER; note = 2'-O-methyl modified nucleotide
  modified_base 6: mod_base = OTHER; note = 2'-fluoro modified nucleotide
  modified_base 7: mod_base = OTHER; note = 2'-O-methyl modified nucleotide
  modified_base 8: mod_base = OTHER; note = 2'-fluoro modified nucleotide
  modified_base 9: mod_base = OTHER; note = 2'-fluoro modified nucleotide
  modified_base 10: mod_base = OTHER; note = 2'-O-methyl modified nucleotide
  modified_base 11: mod_base = OTHER; note = 2'-O-methyl modified nucleotide
  modified_base 12: mod_base = OTHER; note = 2'-O-methyl modified nucleotide
  modified_base 13: mod_base = OTHER; note = 2'-O-methyl modified nucleotide
  modified_base 14: mod_base = OTHER; note = 2'-fluoro modified nucleotide
  modified_base 15: mod_base = OTHER; note = 2'-O-methyl modified nucleotide
  modified_base 16: mod_base = OTHER; note = 2'-fluoro modified nucleotide
  modified_base 17: mod_base = OTHER; note = 2'-O-methyl modified nucleotide
  modified_base 18: mod_base = OTHER; note = 2'-O-methyl modified nucleotide
  modified_base 19: mod_base = OTHER; note = 2'-O-methyl modified nucleotide
  modified_base 20: mod_base = OTHER; note = 2'-O-methyl modified nucleotide
  modified_base 21: mod_base = OTHER; note = 2'-O-methyl modified nucleotide with phosphorothioate linkage
  modified_base 22: mod_base = OTHER; note = 2'-O-methyl modified nucleotide with phosphorothioate linkage
  modified_base 23: mod_base = OTHER; note = 2'-O-methyl modified nucleotide
taacccagcagaaagccaataaa

SEQ ID NO: 360 - RNA, 23 nt, synthetic construct
  source 1..23: mol_type = other RNA
  modified_base 1: mod_base = OTHER; note = Vinyl-phosphonate 2'-O-methyl modified nucleotide with phosphorothioate linkage
  modified_base 2: mod_base = OTHER; note = 2'-fluoro modified nucleotide with phosphorothioate linkage
  modified_base 3: mod_base = OTHER; note = 2'-O-methyl modified nucleotide
  modified_base 4: mod_base = OTHER; note = 2'-O-methyl modified nucleotide
  modified_base 5: mod_base = OTHER; note = 2'-O-methyl modified nucleotide
  modified_base 6: mod_base = OTHER; note = 2'-fluoro modified nucleotide
  modified_base 7: mod_base = OTHER; note = 2'-O-methyl modified nucleotide
  modified_base 8: mod_base = OTHER; note = 2'-fluoro modified nucleotide
  modified_base 9: mod_base = OTHER; note = 2'-fluoro modified nucleotide
  modified_base 10: mod_base = OTHER; note = 2'-O-methyl modified nucleotide
  modified_base 11: mod_base = OTHER; note = 2'-O-methyl modified nucleotide
  modified_base 12: mod_base = OTHER; note = 2'-O-methyl modified nucleotide
  modified_base 13: mod_base = OTHER; note = 2'-O-methyl modified nucleotide
  modified_base 14: mod_base = OTHER; note = 2'-fluoro modified nucleotide
  modified_base 15: mod_base = OTHER; note = 2'-O-methyl modified nucleotide
  modified_base 16: mod_base = OTHER; note = 2'-fluoro modified nucleotide
  modified_base 17: mod_base = OTHER; note = 2'-O-methyl modified nucleotide
  modified_base 18: mod_base = OTHER; note = 2'-O-methyl modified nucleotide
  modified_base 19: mod_base = OTHER; note = 2'-O-methyl modified nucleotide
  modified_base 20: mod_base = OTHER; note = 2'-O-methyl modified nucleotide
  modified_base 21: mod_base = OTHER; note = 2'-O-methyl modified nucleotide with phosphorothioate linkage
  modified_base 22: mod_base = OTHER; note = 2'-O-methyl modified nucleotide with phosphorothioate linkage
  modified_base 23: mod_base = OTHER; note = 2'-O-methyl modified nucleotide
tggaaaatcatgtagaggagggg

SEQ ID NO: 361 - RNA, 23 nt, synthetic construct
  source 1..23: mol_type = other RNA
  modified_base 1: mod_base = OTHER; note = Vinyl-phosphonate 2'-O-methyl modified nucleotide with phosphorothioate linkage
  modified_base 2: mod_base = OTHER; note = 2'-fluoro modified nucleotide with phosphorothioate linkage
  modified_base 3: mod_base = OTHER; note = 2'-O-methyl modified nucleotide
  modified_base 4: mod_base = OTHER; note = 2'-O-methyl modified nucleotide
  modified_base 5: mod_base = OTHER; note = 2'-O-methyl modified nucleotide
  modified_base 6: mod_base = OTHER; note = 2'-fluoro modified nucleotide
  modified_base 7: mod_base = OTHER; note = 2'-O-methyl modified nucleotide
  modified_base 8: mod_base = OTHER; note = 2'-fluoro modified nucleotide
  modified_base 9: mod_base = OTHER; note = 2'-fluoro modified nucleotide
  modified_base 10: mod_base = OTHER; note = 2'-O-methyl modified nucleotide
  modified_base 11: mod_base = OTHER; note = 2'-O-methyl modified nucleotide
  modified_base 12: mod_base = OTHER; note = 2'-O-methyl modified nucleotide
  modified_base 13: mod_base = OTHER; note = 2'-O-methyl modified nucleotide
  modified_base 14: mod_base = OTHER; note = 2'-fluoro modified nucleotide
  modified_base 15: mod_base = OTHER; note = 2'-O-methyl modified nucleotide
  modified_base 16: mod_base = OTHER; note = 2'-fluoro modified nucleotide
  modified_base 17: mod_base = OTHER; note = 2'-O-methyl modified nucleotide
  modified_base 18: mod_base = OTHER; note = 2'-O-methyl modified nucleotide
  modified_base 19: mod_base = OTHER; note = 2'-O-methyl modified nucleotide
  modified_base 20: mod_base = OTHER; note = 2'-O-methyl modified nucleotide
  modified_base 21: mod_base = OTHER; note = 2'-O-methyl modified nucleotide with phosphorothioate linkage
  modified_base 22: mod_base = OTHER; note = 2'-O-methyl modified nucleotide with phosphorothioate linkage
  modified_base 23: mod_base = OTHER; note = 2'-O-methyl modified nucleotide
tataagtgagccttgatcttgct

SEQ ID NO: 362 - RNA, 23 nt, synthetic construct
  source 1..23: mol_type = other RNA
  modified_base 1: mod_base = OTHER; note = Vinyl-phosphonate 2'-O-methyl modified nucleotide with phosphorothioate linkage
  modified_base 2: mod_base = OTHER; note = 2'-fluoro modified nucleotide with phosphorothioate linkage
  modified_base 3: mod_base = OTHER; note = 2'-O-methyl modified nucleotide
  modified_base 4: mod_base = OTHER; note = 2'-O-methyl modified nucleotide
  modified_base 5: mod_base = OTHER; note = 2'-O-methyl modified nucleotide
  modified_base 6: mod_base = OTHER; note = 2'-fluoro modified nucleotide
  modified_base 7: mod_base = OTHER; note = 2'-O-methyl modified nucleotide
  modified_base 8: mod_base = OTHER; note = 2'-fluoro modified nucleotide
  modified_base 9: mod_base = OTHER; note = 2'-fluoro modified nucleotide
  modified_base 10: mod_base = OTHER; note = 2'-O-methyl modified nucleotide
  modified_base 11: mod_base = OTHER; note = 2'-O-methyl modified nucleotide
  modified_base 12: mod_base = OTHER; note = 2'-O-methyl modified nucleotide
  modified_base 13: mod_base = OTHER; note = 2'-O-methyl modified nucleotide
  modified_base 14: mod_base = OTHER; note = 2'-fluoro modified nucleotide
  modified_base 15: mod_base = OTHER; note = 2'-O-methyl modified nucleotide
  modified_base 16: mod_base = OTHER; note = 2'-fluoro modified nucleotide
  modified_base 17: mod_base = OTHER; note = 2'-O-methyl modified nucleotide
  modified_base 18: mod_base = OTHER; note = 2'-O-methyl modified nucleotide
  modified_base 19: mod_base = OTHER; note = 2'-O-methyl modified nucleotide
  modified_base 20: mod_base = OTHER; note = 2'-O-methyl modified nucleotide
  modified_base 21: mod_base = OTHER; note = 2'-O-methyl modified nucleotide with phosphorothioate linkage
  modified_base 22: mod_base = OTHER; note = 2'-O-methyl modified nucleotide with phosphorothioate linkage
  modified_base 23: mod_base = OTHER; note = 2'-O-methyl modified nucleotide
ttggtcatcacaatgctgaggtt

SEQ ID NO: 363 - RNA, 23 nt, synthetic construct
  source 1..23: mol_type = other RNA
  modified_base 1: mod_base = OTHER; note = Vinyl-phosphonate 2'-O-methyl modified nucleotide with phosphorothioate linkage
  modified_base 2: mod_base = OTHER; note = 2'-fluoro modified nucleotide with phosphorothioate linkage
  modified_base 3: mod_base = OTHER; note = 2'-O-methyl modified nucleotide
  modified_base 4: mod_base = OTHER; note = 2'-O-methyl modified nucleotide
  modified_base 5: mod_base = OTHER; note = 2'-O-methyl modified nucleotide
  modified_base 6: mod_base = OTHER; note = 2'-fluoro modified nucleotide
  modified_base 7: mod_base = OTHER; note = 2'-O-methyl modified nucleotide
  modified_base 8: mod_base = OTHER; note = 2'-fluoro modified nucleotide
  modified_base 9: mod_base = OTHER; note = 2'-fluoro modified nucleotide
  modified_base 10: mod_base = OTHER; note = 2'-O-methyl modified nucleotide
  modified_base 11: mod_base = OTHER; note = 2'-O-methyl modified nucleotide
  modified_base 12: mod_base = OTHER; note = 2'-O-methyl modified nucleotide
  modified_base 13: mod_base = OTHER; note = 2'-O-methyl modified nucleotide
  modified_base 14: mod_base = OTHER; note = 2'-fluoro modified nucleotide
  modified_base 15: mod_base = OTHER; note = 2'-O-methyl modified nucleotide
  modified_base 16: mod_base = OTHER; note = 2'-fluoro modified nucleotide
  modified_base 17: mod_base = OTHER; note = 2'-O-methyl modified nucleotide
  modified_base 18: mod_base = OTHER; note = 2'-O-methyl modified nucleotide
  modified_base 19: mod_base = OTHER; note = 2'-O-methyl modified nucleotide
  modified_base 20: mod_base = OTHER; note = 2'-O-methyl modified nucleotide
  modified_base 21: mod_base = OTHER; note = 2'-O-methyl modified nucleotide with phosphorothioate linkage
  modified_base 22: mod_base = OTHER; note = 2'-O-methyl modified nucleotide with phosphorothioate linkage
  modified_base 23: mod_base = OTHER; note = 2'-O-methyl modified nucleotide
ttgcacaagagaatgatgatcat

SEQ ID NO: 364 - RNA, 23 nt, synthetic construct
  source 1..23: mol_type = other RNA
  modified_base 1: mod_base = OTHER; note = Vinyl-phosphonate 2'-O-methyl modified nucleotide with phosphorothioate linkage
  modified_base 2: mod_base = OTHER; note = 2'-fluoro modified nucleotide with phosphorothioate linkage
  modified_base 3: mod_base = OTHER; note = 2'-O-methyl modified nucleotide
  modified_base 4: mod_base = OTHER; note = 2'-O-methyl modified nucleotide
  modified_base 5: mod_base = OTHER; note = 2'-O-methyl modified nucleotide
  modified_base 6: mod_base = OTHER; note = 2'-fluoro modified nucleotide
  modified_base 7: mod_base = OTHER; note = 2'-O-methyl modified nucleotide
  modified_base 8: mod_base = OTHER; note = 2'-fluoro modified nucleotide
  modified_base 9: mod_base = OTHER; note = 2'-fluoro modified nucleotide
  modified_base 10: mod_base = OTHER; note = 2'-O-methyl modified nucleotide
  modified_base 11: mod_base = OTHER; note = 2'-O-methyl modified nucleotide
  modified_base 12: mod_base = OTHER; note = 2'-O-methyl modified nucleotide
  modified_base 13: mod_base = OTHER; note = 2'-O-methyl modified nucleotide
  modified_base 14: mod_base = OTHER; note = 2'-fluoro modified nucleotide
  modified_base 15: mod_base = OTHER; note = 2'-O-methyl modified nucleotide
  modified_base 16: mod_base = OTHER; note = 2'-fluoro modified nucleotide
  modified_base 17: mod_base = OTHER; note = 2'-O-methyl modified nucleotide
  modified_base 18: mod_base = OTHER; note = 2'-O-methyl modified nucleotide
  modified_base 19: mod_base = OTHER; note = 2'-O-methyl modified nucleotide
  modified_base 20: mod_base = OTHER; note = 2'-O-methyl modified nucleotide
  modified_base 21: mod_base = OTHER; note = 2'-O-methyl modified nucleotide with phosphorothioate linkage
  modified_base 22: mod_base = OTHER; note = 2'-O-methyl modified nucleotide with phosphorothioate linkage
  modified_base 23: mod_base = OTHER; note = 2'-O-methyl modified nucleotide
tagagaactgtgacggccacact

SEQ ID NO: 365 - RNA, 23 nt, synthetic construct
  source 1..23: mol_type = other RNA
  modified_base 1: mod_base = OTHER; note = Vinyl-phosphonate 2'-O-methyl modified nucleotide with phosphorothioate linkage
  modified_base 2: mod_base = OTHER; note = 2'-fluoro modified nucleotide with phosphorothioate linkage
  modified_base 3: mod_base = OTHER; note = 2'-O-methyl modified nucleotide
  modified_base 4: mod_base = OTHER; note = 2'-O-methyl modified nucleotide
  modified_base 5: mod_base = OTHER; note = 2'-O-methyl modified nucleotide
  modified_base 6: mod_base = OTHER; note = 2'-fluoro modified nucleotide
  modified_base 7: mod_base = OTHER; note = 2'-O-methyl modified nucleotide
  modified_base 8: mod_base = OTHER; note = 2'-fluoro modified nucleotide
  modified_base 9: mod_base = OTHER; note = 2'-fluoro modified nucleotide
  modified_base 10: mod_base = OTHER; note = 2'-O-methyl modified nucleotide
  modified_base 11: mod_base = OTHER; note = 2'-O-methyl modified nucleotide
  modified_base 12: mod_base = OTHER; note = 2'-O-methyl modified nucleotide
  modified_base 13: mod_base = OTHER; note = 2'-O-methyl modified nucleotide
  modified_base 14: mod_base = OTHER; note = 2'-fluoro modified nucleotide
  modified_base 15: mod_base = OTHER; note = 2'-O-methyl modified nucleotide
  modified_base 16: mod_base = OTHER; note = 2'-fluoro modified nucleotide
  modified_base 17: mod_base = OTHER; note = 2'-O-methyl modified nucleotide
  modified_base 18: mod_base = OTHER; note = 2'-O-methyl modified nucleotide
  modified_base 19: mod_base = OTHER; note = 2'-O-methyl modified nucleotide
  modified_base 20: mod_base = OTHER; note = 2'-O-methyl modified nucleotide
  modified_base 21: mod_base = OTHER; note = 2'-O-methyl modified nucleotide with phosphorothioate linkage
  modified_base 22: mod_base = OTHER; note = 2'-O-methyl modified nucleotide with phosphorothioate linkage
  modified_base 23: mod_base = OTHER; note = 2'-O-methyl modified nucleotide
tagaattgctttgggaccagaat

SEQ ID NO: 366 - RNA, 23 nt, synthetic construct
  source 1..23: mol_type = other RNA
  modified_base 1: mod_base = OTHER; note = Vinyl-phosphonate 2'-O-methyl modified nucleotide with phosphorothioate linkage
  modified_base 2: mod_base = OTHER; note = 2'-fluoro modified nucleotide with phosphorothioate linkage
  modified_base 3: mod_base = OTHER; note = 2'-O-methyl modified nucleotide
  modified_base 4: mod_base = OTHER; note = 2'-O-methyl modified nucleotide
  modified_base 5: mod_base = OTHER; note = 2'-O-methyl modified nucleotide
  modified_base 6: mod_base = OTHER; note = 2'-fluoro modified nucleotide
  modified_base 7: mod_base = OTHER; note = 2'-O-methyl modified nucleotide
  modified_base 8: mod_base = OTHER; note = 2'-fluoro modified nucleotide
  modified_base 9: mod_base = OTHER; note = 2'-fluoro modified nucleotide
  modified_base 10: mod_base = OTHER; note = 2'-O-methyl modified nucleotide
  modified_base 11: mod_base = OTHER; note = 2'-O-methyl modified nucleotide
  modified_base 12: mod_base = OTHER; note = 2'-O-methyl modified nucleotide
  modified_base 13: mod_base = OTHER; note = 2'-O-methyl modified nucleotide
  modified_base 14: mod_base = OTHER; note = 2'-fluoro modified nucleotide
  modified_base 15: mod_base = OTHER; note = 2'-O-methyl modified nucleotide
  modified_base 16: mod_base = OTHER; note = 2'-fluoro modified nucleotide
  modified_base 17: mod_base = OTHER; note = 2'-O-methyl modified nucleotide
  modified_base 18: mod_base = OTHER; note = 2'-O-methyl modified nucleotide
  modified_base 19: mod_base = OTHER; note = 2'-O-methyl modified nucleotide
  modified_base 20: mod_base = OTHER; note = 2'-O-methyl modified nucleotide
  modified_base 21: mod_base = OTHER; note = 2'-O-methyl modified nucleotide with phosphorothioate linkage
  modified_base 22: mod_base = OTHER; note = 2'-O-methyl modified nucleotide with phosphorothioate linkage
  modified_base 23: mod_base = OTHER; note = 2'-O-methyl modified nucleotide
ttctgatagatgtactggaaatg

SEQ ID NO: 367 - RNA, 23 nt, synthetic construct
  source 1..23: mol_type = other RNA
  modified_base 1: mod_base = OTHER; note = Vinyl-phosphonate 2'-O-methyl modified nucleotide with phosphorothioate linkage
  modified_base 2: mod_base = OTHER; note = 2'-fluoro modified nucleotide with phosphorothioate linkage
  modified_base 3: mod_base = OTHER; note = 2'-O-methyl modified nucleotide
  modified_base 4: mod_base = OTHER; note = 2'-O-methyl modified nucleotide
  modified_base 5: mod_base = OTHER; note = 2'-O-methyl modified nucleotide
  modified_base 6: mod_base = OTHER; note = 2'-fluoro modified nucleotide
  modified_base 7: mod_base = OTHER; note = 2'-O-methyl modified nucleotide
  modified_base 8: mod_base = OTHER; note = 2'-fluoro modified nucleotide
  modified_base 9: mod_base = OTHER; note = 2'-fluoro modified nucleotide
  modified_base 10: mod_base = OTHER; note = 2'-O-methyl modified nucleotide
  modified_base 11: mod_base = OTHER; note = 2'-O-methyl modified nucleotide
  modified_base 12: mod_base = OTHER; note = 2'-O-methyl modified nucleotide
  modified_base 13: mod_base = OTHER; note = 2'-O-methyl modified nucleotide
  modified_base 14: mod_base = OTHER; note = 2'-fluoro modified nucleotide
  modified_base 15: mod_base = OTHER; note = 2'-O-methyl modified nucleotide
  modified_base 16: mod_base = OTHER; note = 2'-fluoro modified nucleotide
  modified_base 17: mod_base = OTHER; note = 2'-O-methyl modified nucleotide
  modified_base 18: mod_base = OTHER; note = 2'-O-methyl modified nucleotide
  modified_base 19: mod_base = OTHER; note = 2'-O-methyl modified nucleotide
  modified_base 20: mod_base = OTHER; note = 2'-O-methyl modified nucleotide
  modified_base 21: mod_base = OTHER; note = 2'-O-methyl modified nucleotide with phosphorothioate linkage
  modified_base 22: mod_base = OTHER; note = 2'-O-methyl modified nucleotide with phosphorothioate linkage
  modified_base 23: mod_base = OTHER; note = 2'-O-methyl modified nucleotide
tttctgatagatgtactggaaat

SEQ ID NO: 368 - RNA, 23 nt, synthetic construct
  source 1..23: mol_type = other RNA
  modified_base 1: mod_base = OTHER; note = Vinyl-phosphonate 2'-O-methyl modified nucleotide with phosphorothioate linkage
  modified_base 2: mod_base = OTHER; note = 2'-fluoro modified nucleotide with phosphorothioate linkage
  modified_base 3: mod_base = OTHER; note = 2'-O-methyl modified nucleotide
  modified_base 4: mod_base = OTHER; note = 2'-O-methyl modified nucleotide
  modified_base 5: mod_base = OTHER; note = 2'-O-methyl modified nucleotide
  modified_base 6: mod_base = OTHER; note = 2'-fluoro modified nucleotide
  modified_base 7: mod_base = OTHER; note = 2'-O-methyl modified nucleotide
  modified_base 8: mod_base = OTHER; note = 2'-fluoro modified nucleotide
  modified_base 9: mod_base = OTHER; note = 2'-fluoro modified nucleotide
  modified_base 10: mod_base = OTHER; note = 2'-O-methyl modified nucleotide
  modified_base 11: mod_base = OTHER; note = 2'-O-methyl modified nucleotide
  modified_base 12: mod_base = OTHER; note = 2'-O-methyl modified nucleotide
  modified_base 13: mod_base = OTHER; note = 2'-O-methyl modified nucleotide
  modified_base 14: mod_base = OTHER; note = 2'-fluoro modified nucleotide
  modified_base 15: mod_base = OTHER; note = 2'-O-methyl modified nucleotide
  modified_base 16: mod_base = OTHER; note = 2'-fluoro modified nucleotide
  modified_base 17: mod_base = OTHER; note = 2'-O-methyl modified nucleotide
  modified_base 18: mod_base = OTHER; note = 2'-O-methyl modified nucleotide
  modified_base 19: mod_base = OTHER; note = 2'-O-methyl modified nucleotide
  modified_base 20: mod_base = OTHER; note = 2'-O-methyl modified nucleotide
  modified_base 21: mod_base = OTHER; note = 2'-O-methyl modified nucleotide with phosphorothioate linkage
  modified_base 22: mod_base = OTHER; note = 2'-O-methyl modified nucleotide with phosphorothioate linkage
  modified_base 23: mod_base = OTHER; note = 2'-O-methyl modified nucleotide
tttgatgattctgatagatgtac

SEQ ID NO: 369 - RNA, 23 nt, synthetic construct
  source 1..23: mol_type = other RNA
  modified_base 1: mod_base = OTHER; note = Vinyl-phosphonate 2'-O-methyl modified nucleotide with phosphorothioate linkage
  modified_base 2: mod_base = OTHER; note = 2'-fluoro modified nucleotide with phosphorothioate linkage
  modified_base 3: mod_base = OTHER; note = 2'-O-methyl modified nucleotide
  modified_base 4: mod_base = OTHER; note = 2'-O-methyl modified nucleotide
  modified_base 5: mod_base = OTHER; note = 2'-O-methyl modified nucleotide
  modified_base 6: mod_base = OTHER; note = 2'-fluoro modified nucleotide
  modified_base 7: mod_base = OTHER; note = 2'-O-methyl modified nucleotide
  modified_base 8: mod_base = OTHER; note = 2'-fluoro modified nucleotide
  modified_base 9: mod_base = OTHER; note = 2'-fluoro modified nucleotide
  modified_base 10: mod_base = OTHER; note = 2'-O-methyl modified nucleotide
  modified_base 11: mod_base = OTHER; note = 2'-O-methyl modified nucleotide
  modified_base 12: mod_base = OTHER; note = 2'-O-methyl modified nucleotide
  modified_base 13: mod_base = OTHER; note = 2'-O-methyl modified nucleotide
  modified_base 14: mod_base = OTHER; note = 2'-fluoro modified nucleotide
  modified_base 15: mod_base = OTHER; note = 2'-O-methyl modified nucleotide
  modified_base 16: mod_base = OTHER; note = 2'-fluoro modified nucleotide
  modified_base 17: mod_base = OTHER; note = 2'-O-methyl modified nucleotide
  modified_base 18: mod_base = OTHER; note = 2'-O-methyl modified nucleotide
  modified_base 19: mod_base = OTHER; note = 2'-O-methyl modified nucleotide
  modified_base 20: mod_base = OTHER; note = 2'-O-methyl modified nucleotide
  modified_base 21: mod_base = OTHER; note = 2'-O-methyl modified nucleotide with phosphorothioate linkage
  modified_base 22: mod_base = OTHER; note = 2'-O-methyl modified nucleotide with phosphorothioate linkage
  modified_base 23: mod_base = OTHER; note = 2'-O-methyl modified nucleotide
ttcaggaattgagtgactttaag

SEQ ID NO: 370 - RNA, 23 nt, synthetic construct
  source 1..23: mol_type = other RNA
  modified_base 1: mod_base = OTHER; note = Vinyl-phosphonate 2'-O-methyl modified nucleotide with phosphorothioate linkage
  modified_base 2: mod_base = OTHER; note = 2'-fluoro modified nucleotide with phosphorothioate linkage
  modified_base 3: mod_base = OTHER; note = 2'-O-methyl modified nucleotide
  modified_base 4: mod_base = OTHER; note = 2'-O-methyl modified nucleotide
  modified_base 5: mod_base = OTHER; note = 2'-O-methyl modified nucleotide
  modified_base 6: mod_base = OTHER; note = 2'-fluoro modified nucleotide
  modified_base 7: mod_base = OTHER; note = 2'-O-methyl modified nucleotide
  modified_base 8: mod_base = OTHER; note = 2'-fluoro modified nucleotide
  modified_base 9: mod_base = OTHER; note = 2'-fluoro modified nucleotide
  modified_base 10: mod_base = OTHER; note = 2'-O-methyl modified nucleotide
  modified_base 11: mod_base = OTHER; note = 2'-O-methyl modified nucleotide
  modified_base 12: mod_base = OTHER; note = 2'-O-methyl modified nucleotide
  modified_base 13: mod_base = OTHER; note = 2'-O-methyl modified nucleotide
  modified_base 14: mod_base = OTHER; note = 2'-fluoro modified nucleotide
  modified_base 15: mod_base = OTHER; note = 2'-O-methyl modified nucleotide
  modified_base 16: mod_base = OTHER; note = 2'-fluoro modified nucleotide
  modified_base 17: mod_base = OTHER; note = 2'-O-methyl modified nucleotide
  modified_base 18: mod_base = OTHER; note = 2'-O-methyl modified nucleotide
  modified_base 19: mod_base = OTHER; note = 2'-O-methyl modified nucleotide
  modified_base 20: mod_base = OTHER; note = 2'-O-methyl modified nucleotide
  modified_base 21: mod_base = OTHER; note = 2'-O-methyl modified nucleotide with phosphorothioate linkage
  modified_base 22: mod_base = OTHER; note = 2'-O-methyl modified nucleotide with phosphorothioate linkage
  modified_base 23: mod_base = OTHER; note = 2'-O-methyl modified nucleotide
ttatattgattagttcaggaatt

SEQ ID NO: 371 - RNA, 23 nt, synthetic construct
  source 1..23: mol_type = other RNA
  modified_base 1: mod_base = OTHER; note = Vinyl-phosphonate 2'-O-methyl modified nucleotide with phosphorothioate linkage
  modified_base 2: mod_base = OTHER; note = 2'-fluoro modified nucleotide with phosphorothioate linkage
  modified_base 3: mod_base = OTHER; note = 2'-O-methyl modified nucleotide
  modified_base 4: mod_base = OTHER; note = 2'-O-methyl modified nucleotide
  modified_base 5: mod_base = OTHER; note = 2'-O-methyl modified nucleotide
  modified_base 6: mod_base = OTHER; note = 2'-fluoro modified nucleotide
  modified_base 7: mod_base = OTHER; note = 2'-O-methyl modified nucleotide
  modified_base 8: mod_base = OTHER; note = 2'-fluoro modified nucleotide
  modified_base 9: mod_base = OTHER; note = 2'-fluoro modified nucleotide
  modified_base 10: mod_base = OTHER; note = 2'-O-methyl modified nucleotide
  modified_base 11: mod_base = OTHER; note = 2'-O-methyl modified nucleotide
  modified_base 12: mod_base = OTHER; note = 2'-O-methyl modified nucleotide
  modified_base 13: mod_base = OTHER; note = 2'-O-methyl modified nucleotide
  modified_base 14: mod_base = OTHER; note = 2'-fluoro modified nucleotide
  modified_base 15: mod_base = OTHER; note = 2'-O-methyl modified nucleotide
  modified_base 16: mod_base = OTHER; note = 2'-fluoro modified nucleotide
  modified_base 17: mod_base = OTHER; note = 2'-O-methyl modified nucleotide
  modified_base 18: mod_base = OTHER; note = 2'-O-methyl modified nucleotide
  modified_base 19: mod_base = OTHER; note = 2'-O-methyl modified nucleotide
  modified_base 20: mod_base = OTHER; note = 2'-O-methyl modified nucleotide
  modified_base 21: mod_base = OTHER; note = 2'-O-methyl modified nucleotide with phosphorothioate linkage
  modified_base 22: mod_base = OTHER; note = 2'-O-methyl modified nucleotide with phosphorothioate linkage
  modified_base 23: mod_base = OTHER; note = 2'-O-methyl modified nucleotide
ttatatattgattagttcaggaa

SEQ ID NO: 372 - RNA, 23 nt, synthetic construct
  source 1..23: mol_type = other RNA
  modified_base 1: mod_base = OTHER; note = Vinyl-phosphonate 2'-O-methyl modified nucleotide with phosphorothioate linkage
  modified_base 2: mod_base = OTHER; note = 2'-fluoro modified nucleotide with phosphorothioate linkage
  modified_base 3: mod_base = OTHER; note = 2'-O-methyl modified nucleotide
  modified_base 4: mod_base = OTHER; note = 2'-O-methyl modified nucleotide
  modified_base 5: mod_base = OTHER; note = 2'-O-methyl modified nucleotide
  modified_base 6: mod_base = OTHER; note = 2'-fluoro modified nucleotide
  modified_base 7: mod_base = OTHER; note = 2'-O-methyl modified nucleotide
  modified_base 8: mod_base = OTHER; note = 2'-fluoro modified nucleotide
  modified_base 9: mod_base = OTHER; note = 2'-fluoro modified nucleotide
  modified_base 10: mod_base = OTHER; note = 2'-O-methyl modified nucleotide
  modified_base 11: mod_base = OTHER; note = 2'-O-methyl modified nucleotide
  modified_base 12: mod_base = OTHER; note = 2'-O-methyl modified nucleotide
  modified_base 13: mod_base = OTHER; note = 2'-O-methyl modified nucleotide
  modified_base 14: mod_base = OTHER; note = 2'-fluoro modified nucleotide
  modified_base 15: mod_base = OTHER; note = 2'-O-methyl modified nucleotide
  modified_base 16: mod_base = OTHER; note = 2'-fluoro modified nucleotide
  modified_base 17: mod_base = OTHER; note = 2'-O-methyl modified nucleotide
  modified_base 18: mod_base = OTHER; note = 2'-O-methyl modified nucleotide
  modified_base 19: mod_base = OTHER; note = 2'-O-methyl modified nucleotide
  modified_base 20: mod_base = OTHER; note = 2'-O-methyl modified nucleotide
  modified_base 21: mod_base = OTHER; note = 2'-O-methyl modified nucleotide with phosphorothioate linkage
  modified_base 22: mod_base = OTHER; note = 2'-O-methyl modified nucleotide with phosphorothioate linkage
  modified_base 23: mod_base = OTHER; note = 2'-O-methyl modified nucleotide
ttgcaaggaatgagaaccaggac

SEQ ID NO: 373 - RNA, 23 nt, synthetic construct
  source 1..23: mol_type = other RNA
  modified_base 1: mod_base = OTHER; note = Vinyl-phosphonate 2'-O-methyl modified nucleotide with phosphorothioate linkage
  modified_base 2: mod_base = OTHER; note = 2'-fluoro modified nucleotide with phosphorothioate linkage
  modified_base 3: mod_base = OTHER; note = 2'-O-methyl modified nucleotide
  modified_base 4: mod_base = OTHER; note = 2'-O-methyl modified nucleotide
  modified_base 5: mod_base = OTHER; note = 2'-O-methyl modified nucleotide
  modified_base 6: mod_base = OTHER; note = 2'-fluoro modified nucleotide
  modified_base 7: mod_base = OTHER; note = 2'-O-methyl modified nucleotide
  modified_base 8: mod_base = OTHER; note = 2'-fluoro modified nucleotide
  modified_base 9: mod_base = OTHER; note = 2'-fluoro modified nucleotide
  modified_base 10: mod_base = OTHER; note = 2'-O-methyl modified nucleotide
  modified_base 11: mod_base = OTHER; note = 2'-O-methyl modified nucleotide
  modified_base 12: mod_base = OTHER; note = 2'-O-methyl modified nucleotide
  modified_base 13: mod_base = OTHER; note = 2'-O-methyl modified nucleotide
  modified_base 14: mod_base = OTHER; note = 2'-fluoro modified nucleotide
  modified_base 15: mod_base = OTHER; note = 2'-O-methyl modified nucleotide
  modified_base 16: mod_base = OTHER; note = 2'-fluoro modified nucleotide
  modified_base 17: mod_base = OTHER; note = 2'-O-methyl modified nucleotide
  modified_base 18: mod_base = OTHER; note = 2'-O-methyl modified nucleotide
  modified_base 19: mod_base = OTHER; note = 2'-O-methyl modified nucleotide
  modified_base 20: mod_base = OTHER; note = 2'-O-methyl modified nucleotide
  modified_base 21: mod_base = OTHER; note = 2'-O-methyl modified nucleotide with phosphorothioate linkage
  modified_base 22: mod_base = OTHER; note = 2'-O-methyl modified nucleotide with phosphorothioate linkage
  modified_base 23: mod_base = OTHER; note = 2'-O-methyl modified nucleotide
ttatggtgcaaggaatgagaacc

SEQ ID NO: 374 - RNA, 23 nt, synthetic construct
  source 1..23: mol_type = other RNA
  modified_base 1: mod_base = OTHER; note = Vinyl-phosphonate 2'-O-methyl modified nucleotide with phosphorothioate linkage
  modified_base 2: mod_base = OTHER; note = 2'-fluoro modified nucleotide with phosphorothioate linkage
  modified_base 3: mod_base = OTHER; note = 2'-O-methyl modified nucleotide
  modified_base 4: mod_base = OTHER; note = 2'-O-methyl modified nucleotide
  modified_base 5: mod_base = OTHER; note = 2'-O-methyl modified nucleotide
  modified_base 6: mod_base = OTHER; note = 2'-fluoro modified nucleotide
  modified_base 7: mod_base = OTHER; note = 2'-O-methyl modified nucleotide
  modified_base 8: mod_base = OTHER; note = 2'-fluoro modified nucleotide
  modified_base 9: mod_base = OTHER; note = 2'-fluoro modified nucleotide
  modified_base 10: mod_base = OTHER; note = 2'-O-methyl modified nucleotide
  modified_base 11: mod_base = OTHER; note = 2'-O-methyl modified nucleotide
  modified_base 12: mod_base = OTHER; note = 2'-O-methyl modified nucleotide
  modified_base 13: mod_base = OTHER; note = 2'-O-methyl modified nucleotide
  modified_base 14: mod_base = OTHER; note = 2'-fluoro modified nucleotide
  modified_base 15: mod_base = OTHER; note = 2'-O-methyl modified nucleotide
  modified_base 16: mod_base = OTHER; note = 2'-fluoro modified nucleotide
  modified_base 17: mod_base = OTHER; note = 2'-O-methyl modified nucleotide
  modified_base 18: mod_base = OTHER; note = 2'-O-methyl modified nucleotide
  modified_base 19: mod_base = OTHER; note = 2'-O-methyl modified nucleotide
  modified_base 20: mod_base = OTHER; note = 2'-O-methyl modified nucleotide
  modified_base 21: mod_base = OTHER; note = 2'-O-methyl modified nucleotide with phosphorothioate linkage
  modified_base 22: mod_base = OTHER; note = 2'-O-methyl modified nucleotide with phosphorothioate linkage
  modified_base 23: mod_base = OTHER; note = 2'-O-methyl modified nucleotide
taacccagcagaaagccaataaa

SEQ ID NO: 375 - RNA, 23 nt, synthetic construct
  source 1..23: mol_type = other RNA
  modified_base 1: mod_base = OTHER; note = Vinyl-phosphonate 2'-O-methyl modified nucleotide with phosphorothioate linkage
  modified_base 2: mod_base = OTHER; note = 2'-fluoro modified nucleotide with phosphorothioate linkage
  modified_base 3: mod_base = OTHER; note = 2'-O-methyl modified nucleotide
  modified_base 4: mod_base = OTHER; note = 2'-O-methyl modified nucleotide
  modified_base 5: mod_base = OTHER; note = 2'-O-methyl modified nucleotide
  modified_base 6: mod_base = OTHER; note = 2'-fluoro modified nucleotide
  modified_base 7: mod_base = OTHER; note = 2'-O-methyl modified nucleotide
  modified_base 8: mod_base = OTHER; note = 2'-fluoro modified nucleotide
  modified_base 9: mod_base = OTHER; note = 2'-fluoro modified nucleotide
  modified_base 10: mod_base = OTHER; note = 2'-O-methyl modified nucleotide
  modified_base 11: mod_base = OTHER; note = 2'-O-methyl modified nucleotide
  modified_base 12: mod_base = OTHER; note = 2'-O-methyl modified nucleotide
  modified_base 13: mod_base = OTHER; note = 2'-O-methyl modified nucleotide
  modified_base 14: mod_base = OTHER; note = 2'-fluoro modified nucleotide
  modified_base 15: mod_base = OTHER; note = 2'-O-methyl modified nucleotide
  modified_base 16: mod_base = OTHER; note = 2'-fluoro modified nucleotide
  modified_base 17: mod_base = OTHER; note = 2'-O-methyl modified nucleotide
  modified_base 18: mod_base = OTHER; note = 2'-O-methyl modified nucleotide
  modified_base 19: mod_base = OTHER; note = 2'-O-methyl modified nucleotide
  modified_base 20: mod_base = OTHER; note = 2'-O-methyl modified nucleotide
  modified_base 21: mod_base = OTHER; note = 2'-O-methyl modified nucleotide with phosphorothioate linkage
  modified_base 22: mod_base = OTHER; note = 2'-O-methyl modified nucleotide with phosphorothioate linkage
  modified_base 23: mod_base = OTHER; note = 2'-O-methyl modified nucleotide
tggaaaatcatgtagaggagggg

SEQ ID NO: 376 - RNA, 23 nt, synthetic construct
  source 1..23: mol_type = other RNA
  modified_base 1: mod_base = OTHER; note = Vinyl-phosphonate 2'-O-methyl modified nucleotide with phosphorothioate linkage
  modified_base 2: mod_base = OTHER; note = 2'-fluoro modified nucleotide with phosphorothioate linkage
  modified_base 3: mod_base = OTHER; note = 2'-O-methyl modified nucleotide
  modified_base 4: mod_base = OTHER; note = 2'-O-methyl modified nucleotide
  modified_base 5: mod_base = OTHER; note = 2'-O-methyl modified nucleotide
  modified_base 6: mod_base = OTHER; note = 2'-fluoro modified nucleotide
  modified_base 7: mod_base = OTHER; note = 2'-O-methyl modified nucleotide
  modified_base 8: mod_base = OTHER; note = 2'-O-methyl modified nucleotide
  modified_base 9: mod_base = OTHER; note = 2'-O-methyl modified nucleotide
  modified_base 10: mod_base = OTHER; note = 2'-O-methyl modified nucleotide
  modified_base 11: mod_base = OTHER; note = 2'-O-methyl modified nucleotide
  modified_base 12: mod_base = OTHER; note = 2'-O-methyl modified nucleotide
  modified_base 13: mod_base = OTHER; note = 2'-O-methyl modified nucleotide
  modified_base 14: mod_base = OTHER; note = 2'-fluoro modified nucleotide
  modified_base 15: mod_base = OTHER; note = 2'-O-methyl modified nucleotide
  modified_base 16: mod_base = OTHER; note = 2'-fluoro modified nucleotide
  modified_base 17: mod_base = OTHER; note = 2'-O-methyl modified nucleotide
  modified_base 18: mod_base = OTHER; note = 2'-O-methyl modified nucleotide
  modified_base 19: mod_base = OTHER; note = 2'-O-methyl modified nucleotide
  modified_base 20: mod_base = OTHER; note = 2'-O-methyl modified nucleotide
  modified_base 21: mod_base = OTHER; note = 2'-O-methyl modified nucleotide with phosphorothioate linkage
  modified_base 22: mod_base = OTHER; note = 2'-O-methyl modified nucleotide with phosphorothioate linkage
  modified_base 23: mod_base = OTHER; note = 2'-O-methyl modified nucleotide
tataagtgagccttgatcttgct

SEQ ID NO: 377 - RNA, 23 nt, synthetic construct
  source 1..23: mol_type = other RNA
  modified_base 1: mod_base = OTHER; note = Vinyl-phosphonate 2'-O-methyl modified nucleotide with phosphorothioate linkage
  modified_base 2: mod_base = OTHER; note = 2'-fluoro modified nucleotide with phosphorothioate linkage
  modified_base 3: mod_base = OTHER; note = 2'-O-methyl modified nucleotide
  modified_base 4: mod_base = OTHER; note = 2'-O-methyl modified nucleotide
  modified_base 5: mod_base = OTHER; note = 2'-O-methyl modified nucleotide
  modified_base 6: mod_base = OTHER; note = 2'-fluoro modified nucleotide
  modified_base 7: mod_base = OTHER; note = 2'-O-methyl modified nucleotide
  modified_base 8: mod_base = OTHER; note = 2'-O-methyl modified nucleotide
  modified_base 9: mod_base = OTHER; note = 2'-O-methyl modified nucleotide
  modified_base 10: mod_base = OTHER; note = 2'-O-methyl modified nucleotide
  modified_base 11: mod_base = OTHER; note = 2'-O-methyl modified nucleotide
  modified_base 12: mod_base = OTHER; note = 2'-O-methyl modified nucleotide
  modified_base 13: mod_base = OTHER; note = 2'-O-methyl modified nucleotide
  modified_base 14: mod_base = OTHER; note = 2'-fluoro modified nucleotide
  modified_base 15: mod_base = OTHER; note = 2'-O-methyl modified nucleotide
  modified_base 16: mod_base = OTHER; note = 2'-fluoro modified nucleotide
  modified_base 17: mod_base = OTHER; note = 2'-O-methyl modified nucleotide
  modified_base 18: mod_base = OTHER; note = 2'-O-methyl modified nucleotide
  modified_base 19: mod_base = OTHER; note = 2'-O-methyl modified nucleotide
  modified_base 20: mod_base = OTHER; note = 2'-O-methyl modified nucleotide
  modified_base 21: mod_base = OTHER; note = 2'-O-methyl modified nucleotide with phosphorothioate linkage
  modified_base 22: mod_base = OTHER; note = 2'-O-methyl modified nucleotide with phosphorothioate linkage
  modified_base 23: mod_base = OTHER; note = 2'-O-methyl modified nucleotide
ttggtcatcacaatgctgaggtt

SEQ ID NO: 378 - RNA, 23 nt, synthetic construct
  source 1..23: mol_type = other RNA
  modified_base 1: mod_base = OTHER; note = Vinyl-phosphonate 2'-O-methyl modified nucleotide with phosphorothioate linkage
  modified_base 2: mod_base = OTHER; note = 2'-fluoro modified nucleotide with phosphorothioate linkage
  modified_base 3: mod_base = OTHER; note = 2'-O-methyl modified nucleotide
  modified_base 4: mod_base = OTHER; note = 2'-O-methyl modified nucleotide
  modified_base 5: mod_base = OTHER; note = 2'-O-methyl modified nucleotide
  modified_base 6: mod_base = OTHER; note = 2'-fluoro modified nucleotide
  modified_base 7: mod_base = OTHER; note = 2'-O-methyl modified nucleotide
  modified_base 8: mod_base = OTHER; note = 2'-O-methyl modified nucleotide
  modified_base 9: mod_base = OTHER; note = 2'-O-methyl modified nucleotide
  modified_base 10: mod_base = OTHER; note = 2'-O-methyl modified nucleotide
  modified_base 11: mod_base = OTHER; note = 2'-O-methyl modified nucleotide
  modified_base 12: mod_base = OTHER; note = 2'-O-methyl modified nucleotide
  modified_base 13: mod_base = OTHER; note = 2'-O-methyl modified nucleotide
  modified_base 14: mod_base = OTHER; note = 2'-fluoro modified nucleotide
  modified_base 15: mod_base = OTHER; note = 2'-O-methyl modified nucleotide
  modified_base 16: mod_base = OTHER; note = 2'-fluoro modified nucleotide
  modified_base 17: mod_base = OTHER; note = 2'-O-methyl modified nucleotide
  modified_base 18: mod_base = OTHER; note = 2'-O-methyl modified nucleotide
  modified_base 19: mod_base = OTHER; note = 2'-O-methyl modified nucleotide
  modified_base 20: mod_base = OTHER; note = 2'-O-methyl modified nucleotide
  modified_base 21: mod_base = OTHER; note = 2'-O-methyl modified nucleotide with phosphorothioate linkage
  modified_base 22: mod_base = OTHER; note = 2'-O-methyl modified nucleotide with phosphorothioate linkage
  modified_base 23: mod_base = OTHER; note = 2'-O-methyl modified nucleotide
ttgcacaagagaatgatgatcat

SEQ ID NO: 379 - RNA, 23 nt, synthetic construct
  source 1..23: mol_type = other RNA
  modified_base 1: mod_base = OTHER; note = Vinyl-phosphonate 2'-O-methyl modified nucleotide with phosphorothioate linkage
  modified_base 2: mod_base = OTHER; note = 2'-fluoro modified nucleotide with phosphorothioate linkage
  modified_base 3: mod_base = OTHER; note = 2'-O-methyl modified nucleotide
  modified_base 4: mod_base = OTHER; note = 2'-O-methyl modified nucleotide
  modified_base 5: mod_base = OTHER; note = 2'-O-methyl modified nucleotide
  modified_base 6: mod_base = OTHER; note = 2'-fluoro modified nucleotide
  modified_base 7: mod_base = OTHER; note = 2'-O-methyl modified nucleotide
  modified_base 8: mod_base = OTHER; note = 2'-O-methyl modified nucleotide
  modified_base 9: mod_base = OTHER; note = 2'-O-methyl modified nucleotide
  modified_base 10: mod_base = OTHER; note = 2'-O-methyl modified nucleotide
  modified_base 11: mod_base = OTHER; note = 2'-O-methyl modified nucleotide
  modified_base 12: mod_base = OTHER; note = 2'-O-methyl modified nucleotide
  modified_base 13: mod_base = OTHER; note = 2'-O-methyl modified nucleotide
  modified_base 14: mod_base = OTHER; note = 2'-fluoro modified nucleotide
  modified_base 15: mod_base = OTHER; note = 2'-O-methyl modified nucleotide
  modified_base 16: mod_base = OTHER; note = 2'-fluoro modified nucleotide
  modified_base 17: mod_base = OTHER; note = 2'-O-methyl modified nucleotide
  modified_base 18: mod_base = OTHER; note = 2'-O-methyl modified nucleotide
  modified_base 19: mod_base = OTHER; note = 2'-O-methyl modified nucleotide
  modified_base 20: mod_base = OTHER; note = 2'-O-methyl modified nucleotide
  modified_base 21: mod_base = OTHER; note = 2'-O-methyl modified nucleotide with phosphorothioate linkage
  modified_base 22: mod_base = OTHER; note = 2'-O-methyl modified nucleotide with phosphorothioate linkage
  modified_base 23: mod_base = OTHER; note = 2'-O-methyl modified nucleotide
tagagaactgtgacggccacact

SEQ ID NO: 380 - RNA, 23 nt, synthetic construct
  source 1..23: mol_type = other RNA
  modified_base 1: mod_base = OTHER; note = Vinyl-phosphonate 2'-O-methyl modified nucleotide with phosphorothioate linkage
  modified_base 2: mod_base = OTHER; note = 2'-fluoro modified nucleotide with phosphorothioate linkage
  modified_base 3: mod_base = OTHER; note = 2'-O-methyl modified nucleotide
  modified_base 4: mod_base = OTHER; note = 2'-O-methyl modified nucleotide
  modified_base 5: mod_base = OTHER; note = 2'-O-methyl modified nucleotide
  modified_base 6: mod_base = OTHER; note = 2'-fluoro modified nucleotide
  modified_base 7: mod_base = OTHER; note = 2'-O-methyl modified nucleotide
  modified_base 8: mod_base = OTHER; note = 2'-O-methyl modified nucleotide
  modified_base 9: mod_base = OTHER; note = 2'-O-methyl modified nucleotide
  modified_base 10: mod_base = OTHER; note = 2'-O-methyl modified nucleotide
  modified_base 11: mod_base = OTHER; note = 2'-O-methyl modified nucleotide
  modified_base 12: mod_base = OTHER; note = 2'-O-methyl modified nucleotide
  modified_base 13: mod_base = OTHER; note = 2'-O-methyl modified nucleotide
  modified_base 14: mod_base = OTHER; note = 2'-fluoro modified nucleotide
  modified_base 15: mod_base = OTHER; note = 2'-O-methyl modified nucleotide
  modified_base 16: mod_base = OTHER; note = 2'-fluoro modified nucleotide
  modified_base 17: mod_base = OTHER; note = 2'-O-methyl modified nucleotide
  modified_base 18: mod_base = OTHER; note = 2'-O-methyl modified nucleotide
  modified_base 19: mod_base = OTHER; note = 2'-O-methyl modified nucleotide
  modified_base 20: mod_base = OTHER; note = 2'-O-methyl modified nucleotide
  modified_base 21: mod_base = OTHER; note = 2'-O-methyl modified nucleotide with phosphorothioate linkage
  modified_base 22: mod_base = OTHER; note = 2'-O-methyl modified nucleotide with phosphorothioate linkage
  modified_base 23: mod_base = OTHER; note = 2'-O-methyl modified nucleotide
tagaattgctttgggaccagaat

SEQ ID NO: 381 - RNA, 23 nt, synthetic construct
  source 1..23: mol_type = other RNA
  modified_base 1: mod_base = OTHER; note = Vinyl-phosphonate 2'-O-methyl modified nucleotide with phosphorothioate linkage
  modified_base 2: mod_base = OTHER; note = 2'-fluoro modified nucleotide with phosphorothioate linkage
  modified_base 3: mod_base = OTHER; note = 2'-O-methyl modified nucleotide
  modified_base 4: mod_base = OTHER; note = 2'-O-methyl modified nucleotide
  modified_base 5: mod_base = OTHER; note = 2'-O-methyl modified nucleotide
  modified_base 6: mod_base = OTHER; note = 2'-fluoro modified nucleotide
  modified_base 7: mod_base = OTHER; note = 2'-O-methyl modified nucleotide
  modified_base 8: mod_base = OTHER; note = 2'-O-methyl modified nucleotide
  modified_base 9: mod_base = OTHER; note = 2'-O-methyl modified nucleotide
  modified_base 10: mod_base = OTHER; note = 2'-O-methyl modified nucleotide
  modified_base 11: mod_base = OTHER; note = 2'-O-methyl modified nucleotide
  modified_base 12: mod_base = OTHER; note = 2'-O-methyl modified nucleotide
  modified_base 13: mod_base = OTHER; note = 2'-O-methyl modified nucleotide
  modified_base 14: mod_base = OTHER; note = 2'-fluoro modified nucleotide
  modified_base 15: mod_base = OTHER; note = 2'-O-methyl modified nucleotide
  modified_base 16: mod_base = OTHER; note = 2'-fluoro modified nucleotide
  modified_base 17: mod_base = OTHER; note = 2'-O-methyl modified nucleotide
  modified_base 18: mod_base = OTHER; note = 2'-O-methyl modified nucleotide
  modified_base 19: mod_base = OTHER; note = 2'-O-methyl modified nucleotide
  modified_base 20: mod_base = OTHER; note = 2'-O-methyl modified nucleotide
  modified_base 21: mod_base = OTHER; note = 2'-O-methyl modified nucleotide with phosphorothioate linkage
  modified_base 22: mod_base = OTHER; note = 2'-O-methyl modified nucleotide with phosphorothioate linkage
  modified_base 23: mod_base = OTHER; note = 2'-O-methyl modified nucleotide
ttctgatagatgtactggaaatg

SEQ ID NO: 382 - RNA, 23 nt, synthetic construct
  source 1..23: mol_type = other RNA
  modified_base 1: mod_base = OTHER; note = Vinyl-phosphonate 2'-O-methyl modified nucleotide with phosphorothioate linkage
  modified_base 2: mod_base = OTHER; note = 2'-fluoro modified nucleotide with phosphorothioate linkage
  modified_base 3: mod_base = OTHER; note = 2'-O-methyl modified nucleotide
  modified_base 4: mod_base = OTHER; note = 2'-O-methyl modified nucleotide
  modified_base 5: mod_base = OTHER; note = 2'-O-methyl modified nucleotide
  modified_base 6: mod_base = OTHER; note = 2'-fluoro modified nucleotide
  modified_base 7: mod_base = OTHER; note = 2'-O-methyl modified nucleotide
  modified_base 8: mod_base = OTHER; note = 2'-O-methyl modified nucleotide
  modified_base 9: mod_base = OTHER; note = 2'-O-methyl modified nucleotide
  modified_base 10: mod_base = OTHER; note = 2'-O-methyl modified nucleotide
  modified_base 11: mod_base = OTHER; note = 2'-O-methyl modified nucleotide
  modified_base 12: mod_base = OTHER; note = 2'-O-methyl modified nucleotide
  modified_base 13: mod_base = OTHER; note = 2'-O-methyl modified nucleotide
  modified_base 14: mod_base = OTHER; note = 2'-fluoro modified nucleotide
  modified_base 15: mod_base = OTHER; note = 2'-O-methyl modified nucleotide
  modified_base 16: mod_base = OTHER; note = 2'-fluoro modified nucleotide
  modified_base 17: mod_base = OTHER; note = 2'-O-methyl modified nucleotide
  modified_base 18: mod_base = OTHER; note = 2'-O-methyl modified nucleotide
  modified_base 19: mod_base = OTHER; note = 2'-O-methyl modified nucleotide
  modified_base 20: mod_base = OTHER; note = 2'-O-methyl modified nucleotide
  modified_base 21: mod_base = OTHER; note = 2'-O-methyl modified nucleotide with phosphorothioate linkage
  modified_base 22: mod_base = OTHER; note = 2'-O-methyl modified nucleotide with phosphorothioate linkage
  modified_base 23: mod_base = OTHER; note = 2'-O-methyl modified nucleotide
tttctgatagatgtactggaaat

SEQ ID NO: 383 - RNA, 23 nt, synthetic construct
  source 1..23: mol_type = other RNA
  modified_base 1: mod_base = OTHER; note = Vinyl-phosphonate 2'-O-methyl modified nucleotide with phosphorothioate linkage
  modified_base 2: mod_base = OTHER; note = 2'-fluoro modified nucleotide with phosphorothioate linkage
  modified_base 3: mod_base = OTHER; note = 2'-O-methyl modified nucleotide
  modified_base 4: mod_base = OTHER; note = 2'-O-methyl modified nucleotide
  modified_base 5: mod_base = OTHER; note = 2'-O-methyl modified nucleotide
  modified_base 6: mod_base = OTHER; note = 2'-fluoro modified nucleotide
  modified_base 7: mod_base = OTHER; note = 2'-O-methyl modified nucleotide
  modified_base 8: mod_base = OTHER; note = 2'-O-methyl modified nucleotide
  modified_base 9: mod_base = OTHER; note = 2'-O-methyl modified nucleotide
  modified_base 10: mod_base = OTHER; note = 2'-O-methyl modified nucleotide
  modified_base 11: mod_base = OTHER; note = 2'-O-methyl modified nucleotide
  modified_base 12: mod_base = OTHER; note = 2'-O-methyl modified nucleotide
  modified_base 13: mod_base = OTHER; note = 2'-O-methyl modified nucleotide
  modified_base 14: mod_base = OTHER; note = 2'-fluoro modified nucleotide
  modified_base 15: mod_base = OTHER; note = 2'-O-methyl modified nucleotide
  modified_base 16: mod_base = OTHER; note = 2'-fluoro modified nucleotide
  modified_base 17: mod_base = OTHER; note = 2'-O-methyl modified nucleotide
  modified_base 18: mod_base = OTHER; note = 2'-O-methyl modified nucleotide
  modified_base 19: mod_base = OTHER; note = 2'-O-methyl modified nucleotide
  modified_base 20: mod_base = OTHER; note = 2'-O-methyl modified nucleotide
  modified_base 21: mod_base = OTHER; note = 2'-O-methyl modified nucleotide with phosphorothioate linkage
  modified_base 22: mod_base = OTHER; note = 2'-O-methyl modified nucleotide with phosphorothioate linkage
  modified_base 23: mod_base = OTHER; note = 2'-O-methyl modified nucleotide
tttgatgattctgatagatgtac

SEQ ID NO: 384 - RNA, 23 nt, synthetic construct
  source 1..23: mol_type = other RNA
  modified_base 1: mod_base = OTHER; note = Vinyl-phosphonate 2'-O-methyl modified nucleotide with phosphorothioate linkage
  modified_base 2: mod_base = OTHER; note = 2'-fluoro modified nucleotide with phosphorothioate linkage
  modified_base 3: mod_base = OTHER; note = 2'-O-methyl modified nucleotide
  modified_base 4: mod_base = OTHER; note = 2'-O-methyl modified nucleotide
  modified_base 5: mod_base = OTHER; note = 2'-O-methyl modified nucleotide
  modified_base 6: mod_base = OTHER; note = 2'-fluoro modified nucleotide
  modified_base 7: mod_base = OTHER; note = 2'-O-methyl modified nucleotide
  modified_base 8: mod_base = OTHER; note = 2'-O-methyl modified nucleotide
  modified_base 9: mod_base = OTHER; note = 2'-O-methyl modified nucleotide
  modified_base 10: mod_base = OTHER; note = 2'-O-methyl modified nucleotide
  modified_base 11: mod_base = OTHER; note = 2'-O-methyl modified nucleotide
  modified_base 12: mod_base = OTHER; note = 2'-O-methyl modified nucleotide
  modified_base 13: mod_base = OTHER; note = 2'-O-methyl modified nucleotide
  modified_base 14: mod_base = OTHER; note = 2'-fluoro modified nucleotide
  modified_base 15: mod_base = OTHER; note = 2'-O-methyl modified nucleotide
  modified_base 16: mod_base = OTHER; note = 2'-fluoro modified nucleotide
  modified_base 17: mod_base = OTHER; note = 2'-O-methyl modified nucleotide
  modified_base 18: mod_base = OTHER; note = 2'-O-methyl modified nucleotide
  modified_base 19: mod_base = OTHER; note = 2'-O-methyl modified nucleotide
  modified_base 20: mod_base = OTHER; note = 2'-O-methyl modified nucleotide
  modified_base 21: mod_base = OTHER; note = 2'-O-methyl modified nucleotide with phosphorothioate linkage
  modified_base 22: mod_base = OTHER; note = 2'-O-methyl modified nucleotide with phosphorothioate linkage
  modified_base 23: mod_base = OTHER; note = 2'-O-methyl modified nucleotide
ttcaggaattgagtgactttaag

SEQ ID NO: 385 - RNA, 23 nt, synthetic construct
  source 1..23: mol_type = other RNA
  modified_base 1: mod_base = OTHER; note = Vinyl-phosphonate 2'-O-methyl modified nucleotide with phosphorothioate linkage
  modified_base 2: mod_base = OTHER; note = 2'-fluoro modified nucleotide with phosphorothioate linkage
  modified_base 3: mod_base = OTHER; note = 2'-O-methyl modified nucleotide
  modified_base 4: mod_base = OTHER; note = 2'-O-methyl modified nucleotide
  modified_base 5: mod_base = OTHER; note = 2'-O-methyl modified nucleotide
  modified_base 6: mod_base = OTHER; note = 2'-fluoro modified nucleotide
  modified_base 7: mod_base = OTHER; note = 2'-O-methyl modified nucleotide
  modified_base 8: mod_base = OTHER; note = 2'-O-methyl modified nucleotide
  modified_base 9: mod_base = OTHER; note = 2'-O-methyl modified nucleotide
  modified_base 10: mod_base = OTHER; note = 2'-O-methyl modified nucleotide
  modified_base 11: mod_base = OTHER; note = 2'-O-methyl modified nucleotide
  modified_base 12: mod_base = OTHER; note = 2'-O-methyl modified nucleotide
  modified_base 13: mod_base = OTHER; note = 2'-O-methyl modified nucleotide
  modified_base 14: mod_base = OTHER; note = 2'-fluoro modified nucleotide
  modified_base 15: mod_base = OTHER; note = 2'-O-methyl modified nucleotide
  modified_base 16: mod_base = OTHER; note = 2'-fluoro modified nucleotide
  modified_base 17: mod_base = OTHER; note = 2'-O-methyl modified nucleotide
  modified_base 18: mod_base = OTHER; note = 2'-O-methyl modified nucleotide
  modified_base 19: mod_base = OTHER; note = 2'-O-methyl modified nucleotide
  modified_base 20: mod_base = OTHER; note = 2'-O-methyl modified nucleotide
  modified_base 21: mod_base = OTHER; note = 2'-O-methyl modified nucleotide with phosphorothioate linkage
  modified_base 22: mod_base = OTHER; note = 2'-O-methyl modified nucleotide with phosphorothioate linkage
  modified_base 23: mod_base = OTHER; note = 2'-O-methyl modified nucleotide
ttatattgattagttcaggaatt

SEQ ID NO: 386 - RNA, 23 nt, synthetic construct
  source 1..23: mol_type = other RNA
  modified_base 1: mod_base = OTHER; note = Vinyl-phosphonate 2'-O-methyl modified nucleotide with phosphorothioate linkage
  modified_base 2: mod_base = OTHER; note = 2'-fluoro modified nucleotide with phosphorothioate linkage
  modified_base 3: mod_base = OTHER; note = 2'-O-methyl modified nucleotide
  modified_base 4: mod_base = OTHER; note = 2'-O-methyl modified nucleotide
  modified_base 5: mod_base = OTHER; note = 2'-O-methyl modified nucleotide
  modified_base 6: mod_base = OTHER; note = 2'-fluoro modified nucleotide
  modified_base 7: mod_base = OTHER; note = 2'-O-methyl modified nucleotide
  modified_base 8: mod_base = OTHER; note = 2'-O-methyl modified nucleotide
  modified_base 9: mod_base = OTHER; note = 2'-O-methyl modified nucleotide
  modified_base 10: mod_base = OTHER; note = 2'-O-methyl modified nucleotide
  modified_base 11: mod_base = OTHER; note = 2'-O-methyl modified nucleotide
  modified_base 12: mod_base = OTHER; note = 2'-O-methyl modified nucleotide
  modified_base 13: mod_base = OTHER; note = 2'-O-methyl modified nucleotide
  modified_base 14: mod_base = OTHER; note = 2'-fluoro modified nucleotide
  modified_base 15: mod_base = OTHER; note = 2'-O-methyl modified nucleotide
  modified_base 16: mod_base = OTHER; note = 2'-fluoro modified nucleotide
  modified_base 17: mod_base = OTHER; note = 2'-O-methyl modified nucleotide
  modified_base 18: mod_base = OTHER; note = 2'-O-methyl modified nucleotide
  modified_base 19: mod_base = OTHER; note = 2'-O-methyl modified nucleotide
  modified_base 20: mod_base = OTHER; note = 2'-O-methyl modified nucleotide
  modified_base 21: mod_base = OTHER; note = 2'-O-methyl modified nucleotide with phosphorothioate linkage
  modified_base 22: mod_base = OTHER; note = 2'-O-methyl modified nucleotide with phosphorothioate linkage
  modified_base 23: mod_base = OTHER; note = 2'-O-methyl modified nucleotide
ttatatattgattagttcaggaa

SEQ ID NO: 387 - RNA, 23 nt, synthetic construct
  source 1..23: mol_type = other RNA
  modified_base 1: mod_base = OTHER; note = Vinyl-phosphonate 2'-O-methyl modified nucleotide with phosphorothioate linkage
  modified_base 2: mod_base = OTHER; note = 2'-fluoro modified nucleotide with phosphorothioate linkage
  modified_base 3: mod_base = OTHER; note = 2'-O-methyl modified nucleotide
  modified_base 4: mod_base = OTHER; note = 2'-O-methyl modified nucleotide
  modified_base 5: mod_base = OTHER; note = 2'-O-methyl modified nucleotide
  modified_base 6: mod_base = OTHER; note = 2'-fluoro modified nucleotide
  modified_base 7: mod_base = OTHER; note = 2'-O-methyl modified nucleotide
  modified_base 8: mod_base = OTHER; note = 2'-O-methyl modified nucleotide
  modified_base 9: mod_base = OTHER; note = 2'-O-methyl modified nucleotide
  modified_base 10: mod_base = OTHER; note = 2'-O-methyl modified nucleotide
  modified_base 11: mod_base = OTHER; note = 2'-O-methyl modified nucleotide
  modified_base 12: mod_base = OTHER; note = 2'-O-methyl modified nucleotide
  modified_base 13: mod_base = OTHER; note = 2'-O-methyl modified nucleotide
  modified_base 14: mod_base = OTHER; note = 2'-fluoro modified nucleotide
  modified_base 15: mod_base = OTHER; note = 2'-O-methyl modified nucleotide
  modified_base 16: mod_base = OTHER; note = 2'-fluoro modified nucleotide
  modified_base 17: mod_base = OTHER; note = 2'-O-methyl modified nucleotide
  modified_base 18: mod_base = OTHER; note = 2'-O-methyl modified nucleotide
  modified_base 19: mod_base = OTHER; note = 2'-O-methyl modified nucleotide
  modified_base 20: mod_base = OTHER; note = 2'-O-methyl modified nucleotide
  modified_base 21: mod_base = OTHER; note = 2'-O-methyl modified nucleotide with phosphorothioate linkage
  modified_base 22: mod_base = OTHER; note = 2'-O-methyl modified nucleotide with phosphorothioate linkage
  modified_base 23: mod_base = OTHER; note = 2'-O-methyl modified nucleotide
ttgcaaggaatgagaaccaggac

SEQ ID NO: 388 - RNA, 23 nt, synthetic construct
  source 1..23: mol_type = other RNA
  modified_base 1: mod_base = OTHER; note = Vinyl-phosphonate 2'-O-methyl modified nucleotide with phosphorothioate linkage
  modified_base 2: mod_base = OTHER; note = 2'-fluoro modified nucleotide with phosphorothioate linkage
  modified_base 3: mod_base = OTHER; note = 2'-O-methyl modified nucleotide
  modified_base 4: mod_base = OTHER; note = 2'-O-methyl modified nucleotide
  modified_base 5: mod_base = OTHER; note = 2'-O-methyl modified nucleotide
  modified_base 6: mod_base = OTHER; note = 2'-fluoro modified nucleotide
  modified_base 7: mod_base = OTHER; note = 2'-O-methyl modified nucleotide
  modified_base 8: mod_base = OTHER; note = 2'-O-methyl modified nucleotide
  modified_base 9: mod_base = OTHER; note = 2'-O-methyl modified nucleotide
  modified_base 10: mod_base = OTHER; note = 2'-O-methyl modified nucleotide
  modified_base 11: mod_base = OTHER; note = 2'-O-methyl modified nucleotide
  modified_base 12: mod_base = OTHER; note = 2'-O-methyl modified nucleotide
  modified_base 13: mod_base = OTHER; note = 2'-O-methyl modified nucleotide
  modified_base 14: mod_base = OTHER; note = 2'-fluoro modified nucleotide
  modified_base 15: mod_base = OTHER; note = 2'-O-methyl modified nucleotide
  modified_base 16: mod_base = OTHER; note = 2'-fluoro modified nucleotide
  modified_base 17: mod_base = OTHER; note = 2'-O-methyl modified nucleotide
  modified_base 18: mod_base = OTHER; note = 2'-O-methyl modified nucleotide
  modified_base 19: mod_base = OTHER; note = 2'-O-methyl modified nucleotide
  modified_base 20: mod_base = OTHER; note = 2'-O-methyl modified nucleotide
  modified_base 21: mod_base = OTHER; note = 2'-O-methyl modified nucleotide with phosphorothioate linkage
  modified_base 22: mod_base = OTHER; note = 2'-O-methyl modified nucleotide with phosphorothioate linkage
  modified_base 23: mod_base = OTHER; note = 2'-O-methyl modified nucleotide
ttatggtgcaaggaatgagaacc

SEQ ID NO: 389 - RNA, 23 nt, synthetic construct
  source 1..23: mol_type = other RNA
  modified_base 1: mod_base = OTHER; note = Vinyl-phosphonate 2'-O-methyl modified nucleotide with phosphorothioate linkage
  modified_base 2: mod_base = OTHER; note = 2'-fluoro modified nucleotide with phosphorothioate linkage
  modified_base 3: mod_base = OTHER; note = 2'-O-methyl modified nucleotide
  modified_base 4: mod_base = OTHER; note = 2'-O-methyl modified nucleotide
  modified_base 5: mod_base = OTHER; note = 2'-O-methyl modified nucleotide
  modified_base 6: mod_base = OTHER; note = 2'-fluoro modified nucleotide
  modified_base 7: mod_base = OTHER; note = 2'-O-methyl modified nucleotide
  modified_base 8: mod_base = OTHER; note = 2'-O-methyl modified nucleotide
  modified_base 9: mod_base = OTHER; note = 2'-O-methyl modified nucleotide
  modified_base 10: mod_base = OTHER; note = 2'-O-methyl modified nucleotide
  modified_base 11: mod_base = OTHER; note = 2'-O-methyl modified nucleotide
  modified_base 12: mod_base = OTHER; note = 2'-O-methyl modified nucleotide
  modified_base 13: mod_base = OTHER; note = 2'-O-methyl modified nucleotide
  modified_base 14: mod_base = OTHER; note = 2'-fluoro modified nucleotide
  modified_base 15: mod_base = OTHER; note = 2'-O-methyl modified nucleotide
  modified_base 16: mod_base = OTHER; note = 2'-fluoro modified nucleotide
  modified_base 17: mod_base = OTHER; note = 2'-O-methyl modified nucleotide
  modified_base 18: mod_base = OTHER; note = 2'-O-methyl modified nucleotide
  modified_base 19: mod_base = OTHER; note = 2'-O-methyl modified nucleotide
  modified_base 20: mod_base = OTHER; note = 2'-O-methyl modified nucleotide
  modified_base 21: mod_base = OTHER; note = 2'-O-methyl modified nucleotide with phosphorothioate linkage
  modified_base 22: mod_base = OTHER; note = 2'-O-methyl modified nucleotide with phosphorothioate linkage
  modified_base 23: mod_base = OTHER; note = 2'-O-methyl modified nucleotide
taacccagcagaaagccaataaa

SEQ ID NO: 390 - RNA, 23 nt, synthetic construct
  source 1..23: mol_type = other RNA
  modified_base 1: mod_base = OTHER; note = Vinyl-phosphonate 2'-O-methyl modified nucleotide with phosphorothioate linkage
  modified_base 2: mod_base = OTHER; note = 2'-fluoro modified nucleotide with phosphorothioate linkage
  modified_base 3: mod_base = OTHER; note = 2'-O-methyl modified nucleotide
  modified_base 4: mod_base = OTHER; note = 2'-O-methyl modified nucleotide
  modified_base 5: mod_base = OTHER; note = 2'-O-methyl modified nucleotide
  modified_base 6: mod_base = OTHER; note = 2'-fluoro modified nucleotide
  modified_base 7: mod_base = OTHER; note = 2'-O-methyl modified nucleotide
  modified_base 8: mod_base = OTHER; note = 2'-O-methyl modified nucleotide
  modified_base 9: mod_base = OTHER; note = 2'-O-methyl modified nucleotide
  modified_base 10: mod_base = OTHER; note = 2'-O-methyl modified nucleotide
  modified_base 11: mod_base = OTHER; note = 2'-O-methyl modified nucleotide
  modified_base 12: mod_base = OTHER; note = 2'-O-methyl modified nucleotide
  modified_base 13: mod_base = OTHER; note = 2'-O-methyl modified nucleotide
  modified_base 14: mod_base = OTHER; note = 2'-fluoro modified nucleotide
  modified_base 15: mod_base = OTHER; note = 2'-O-methyl modified nucleotide
  modified_base 16: mod_base = OTHER; note = 2'-fluoro modified nucleotide
  modified_base 17: mod_base = OTHER; note = 2'-O-methyl modified nucleotide
  modified_base 18: mod_base = OTHER; note = 2'-O-methyl modified nucleotide
  modified_base 19: mod_base = OTHER; note = 2'-O-methyl modified nucleotide
  modified_base 20: mod_base = OTHER; note = 2'-O-methyl modified nucleotide
  modified_base 21: mod_base = OTHER; note = 2'-O-methyl modified nucleotide with phosphorothioate linkage
  modified_base 22: mod_base = OTHER; note = 2'-O-methyl modified nucleotide with phosphorothioate linkage
  modified_base 23: mod_base = OTHER; note = 2'-O-methyl modified nucleotide
tggaaaatcatgtagaggagggg

SEQ ID NO: 391 - RNA, 21 nt, synthetic construct
  source 1..21: mol_type = other RNA
  modified_base 1: mod_base = OTHER; note = Vinyl-phosphonate 2'-O-methyl modified nucleotide with phosphorothioate linkage
  modified_base 2: mod_base = OTHER; note = 2'-fluoro modified nucleotide with phosphorothioate linkage
  modified_base 3: mod_base = OTHER; note = 2'-O-methyl modified nucleotide
  modified_base 4: mod_base = OTHER; note = 2'-O-methyl modified nucleotide
  modified_base 5: mod_base = OTHER; note = 2'-O-methyl modified nucleotide
  modified_base 6: mod_base = OTHER; note = 2'-fluoro modified nucleotide
  modified_base 7: mod_base = OTHER; note = 2'-O-methyl modified nucleotide
  modified_base 8: mod_base = OTHER; note = 2'-fluoro modified nucleotide
  modified_base 9: mod_base = OTHER; note = 2'-fluoro modified nucleotide
  modified_base 10: mod_base = OTHER; note = 2'-O-methyl modified nucleotide
  modified_base 11: mod_base = OTHER; note = 2'-O-methyl modified nucleotide
  modified_base 12: mod_base = OTHER; note = 2'-O-methyl modified nucleotide
  modified_base 13: mod_base = OTHER; note = 2'-O-methyl modified nucleotide
  modified_base 14: mod_base = OTHER; note = 2'-fluoro modified nucleotide
  modified_base 15: mod_base = OTHER; note = 2'-O-methyl modified nucleotide
  modified_base 16: mod_base = OTHER; note = 2'-fluoro modified nucleotide
  modified_base 17: mod_base = OTHER; note = 2'-O-methyl modified nucleotide
  modified_base 18: mod_base = OTHER; note = 2'-O-methyl modified nucleotide
  modified_base 19: mod_base = OTHER; note = 2'-O-methyl modified nucleotide with phosphorothioate linkage
  modified_base 20: mod_base = OTHER; note = 2'-O-methyl modified nucleotide with phosphorothioate linkage
  modified_base 21: mod_base = OTHER; note = 2'-O-methyl modified nucleotide
tataagtgagccttgatcttg

SEQ ID NO: 392 - RNA, 21 nt, synthetic construct
  source 1..21: mol_type = other RNA
  modified_base 1: mod_base = OTHER; note = Vinyl-phosphonate 2'-O-methyl modified nucleotide with phosphorothioate linkage
  modified_base 2: mod_base = OTHER; note = 2'-fluoro modified nucleotide with phosphorothioate linkage
  modified_base 3: mod_base = OTHER; note = 2'-O-methyl modified nucleotide
  modified_base 4: mod_base = OTHER; note = 2'-O-methyl modified nucleotide
  modified_base 5: mod_base = OTHER; note = 2'-O-methyl modified nucleotide
  modified_base 6: mod_base = OTHER; note = 2'-fluoro modified nucleotide
  modified_base 7: mod_base = OTHER; note = 2'-O-methyl modified nucleotide
  modified_base 8: mod_base = OTHER; note = 2'-fluoro modified nucleotide
  modified_base 9: mod_base = OTHER; note = 2'-fluoro modified nucleotide
  modified_base 10: mod_base = OTHER; note = 2'-O-methyl modified nucleotide
  modified_base 11: mod_base = OTHER; note = 2'-O-methyl modified nucleotide
  modified_base 12: mod_base = OTHER; note = 2'-O-methyl modified nucleotide
  modified_base 13: mod_base = OTHER; note = 2'-O-methyl modified nucleotide
  modified_base 14: mod_base = OTHER; note = 2'-fluoro modified nucleotide
  modified_base 15: mod_base = OTHER; note = 2'-O-methyl modified nucleotide
  modified_base 16: mod_base = OTHER; note = 2'-fluoro modified nucleotide
  modified_base 17: mod_base = OTHER; note = 2'-O-methyl modified nucleotide
  modified_base 18: mod_base = OTHER; note = 2'-O-methyl modified nucleotide
  modified_base 19: mod_base = OTHER; note = 2'-O-methyl modified nucleotide with phosphorothioate linkage
  modified_base 20: mod_base = OTHER; note = 2'-O-methyl modified nucleotide with phosphorothioate linkage
  modified_base 21: mod_base = OTHER; note = 2'-O-methyl modified nucleotide
ttggtcatcacaatgctgagg

SEQ ID NO: 393 - RNA, 21 nt, synthetic construct
  source 1..21: mol_type = other RNA
  modified_base 1: mod_base = OTHER; note = Vinyl-phosphonate 2'-O-methyl modified nucleotide with phosphorothioate linkage
  modified_base 2: mod_base = OTHER; note = 2'-fluoro modified nucleotide with phosphorothioate linkage
  modified_base 3: mod_base = OTHER; note = 2'-O-methyl modified nucleotide
  modified_base 4: mod_base = OTHER; note = 2'-O-methyl modified nucleotide
  modified_base 5: mod_base = OTHER; note = 2'-O-methyl modified nucleotide
  modified_base 6: mod_base = OTHER; note = 2'-fluoro modified nucleotide
  modified_base 7: mod_base = OTHER; note = 2'-O-methyl modified nucleotide
  modified_base 8: mod_base = OTHER; note = 2'-fluoro modified nucleotide
  modified_base 9: mod_base = OTHER; note = 2'-fluoro modified nucleotide
  modified_base 10: mod_base = OTHER; note = 2'-O-methyl modified nucleotide
  modified_base 11: mod_base = OTHER; note = 2'-O-methyl modified nucleotide
  modified_base 12: mod_base = OTHER; note = 2'-O-methyl modified nucleotide
  modified_base 13: mod_base = OTHER; note = 2'-O-methyl modified nucleotide
  modified_base 14: mod_base = OTHER; note = 2'-fluoro modified nucleotide
  modified_base 15: mod_base = OTHER; note = 2'-O-methyl modified nucleotide
  modified_base 16: mod_base = OTHER; note = 2'-fluoro modified nucleotide
  modified_base 17: mod_base = OTHER; note = 2'-O-methyl modified nucleotide
  modified_base 18: mod_base = OTHER; note = 2'-O-methyl modified nucleotide
  modified_base 19: mod_base = OTHER; note = 2'-O-methyl modified nucleotide with phosphorothioate linkage
  modified_base 20: mod_base = OTHER; note = 2'-O-methyl modified nucleotide with phosphorothioate linkage
  modified_base 21: mod_base = OTHER; note = 2'-O-methyl modified nucleotide
ttgcacaagagaatgatgatc

SEQ ID NO: 394 - RNA, 21 nt, synthetic construct
  source 1..21: mol_type = other RNA
  modified_base 1: mod_base = OTHER; note = Vinyl-phosphonate 2'-O-methyl modified nucleotide with phosphorothioate linkage
  modified_base 2: mod_base = OTHER; note = 2'-fluoro modified nucleotide with phosphorothioate linkage
  modified_base 3: mod_base = OTHER; note = 2'-O-methyl modified nucleotide
  modified_base 4: mod_base = OTHER; note = 2'-O-methyl modified nucleotide
  modified_base 5: mod_base = OTHER; note = 2'-O-methyl modified nucleotide
  modified_base 6: mod_base = OTHER; note = 2'-fluoro modified nucleotide
  modified_base 7: mod_base = OTHER; note = 2'-O-methyl modified nucleotide
  modified_base 8: mod_base = OTHER; note = 2'-fluoro modified nucleotide
  modified_base 9: mod_base = OTHER; note = 2'-fluoro modified nucleotide
  modified_base 10: mod_base = OTHER; note = 2'-O-methyl modified nucleotide
  modified_base 11: mod_base = OTHER; note = 2'-O-methyl modified nucleotide
  modified_base 12: mod_base = OTHER; note = 2'-O-methyl modified nucleotide
  modified_base 13: mod_base = OTHER; note = 2'-O-methyl modified nucleotide
  modified_base 14: mod_base = OTHER; note = 2'-fluoro modified nucleotide
  modified_base 15: mod_base = OTHER; note = 2'-O-methyl modified nucleotide
  modified_base 16: mod_base = OTHER; note = 2'-fluoro modified nucleotide
  modified_base 17: mod_base = OTHER; note = 2'-O-methyl modified nucleotide
  modified_base 18: mod_base = OTHER; note = 2'-O-methyl modified nucleotide
  modified_base 19: mod_base = OTHER; note = 2'-O-methyl modified nucleotide with phosphorothioate linkage
  modified_base 20: mod_base = OTHER; note = 2'-O-methyl modified nucleotide with phosphorothioate linkage
  modified_base 21: mod_base = OTHER; note = 2'-O-methyl modified nucleotide
tagagaactgtgacggccaca

SEQ ID NO: 395 - RNA, 21 nt, synthetic construct
  source 1..21: mol_type = other RNA
  modified_base 1: mod_base = OTHER; note = Vinyl-phosphonate 2'-O-methyl modified nucleotide with phosphorothioate linkage
  modified_base 2: mod_base = OTHER; note = 2'-fluoro modified nucleotide with phosphorothioate linkage
  modified_base 3: mod_base = OTHER; note = 2'-O-methyl modified nucleotide
  modified_base 4: mod_base = OTHER; note = 2'-O-methyl modified nucleotide
  modified_base 5: mod_base = OTHER; note = 2'-O-methyl modified nucleotide
  modified_base 6: mod_base = OTHER; note = 2'-fluoro modified nucleotide
  modified_base 7: mod_base = OTHER; note = 2'-O-methyl modified nucleotide
  modified_base 8: mod_base = OTHER; note = 2'-fluoro modified nucleotide
  modified_base 9: mod_base = OTHER; note = 2'-fluoro modified nucleotide
  modified_base 10: mod_base = OTHER; note = 2'-O-methyl modified nucleotide
  modified_base 11: mod_base = OTHER; note = 2'-O-methyl modified nucleotide
  modified_base 12: mod_base = OTHER; note = 2'-O-methyl modified nucleotide
  modified_base 13: mod_base = OTHER; note = 2'-O-methyl modified nucleotide
  modified_base 14: mod_base = OTHER; note = 2'-fluoro modified nucleotide
  modified_base 15: mod_base = OTHER; note = 2'-O-methyl modified nucleotide
  modified_base 16: mod_base = OTHER; note = 2'-fluoro modified nucleotide
  modified_base 17: mod_base = OTHER; note = 2'-O-methyl modified nucleotide
  modified_base 18: mod_base = OTHER; note = 2'-O-methyl modified nucleotide
  modified_base 19: mod_base = OTHER; note = 2'-O-methyl modified nucleotide with phosphorothioate linkage
  modified_base 20: mod_base = OTHER; note = 2'-O-methyl modified nucleotide with phosphorothioate linkage
  modified_base 21: mod_base = OTHER; note = 2'-O-methyl modified nucleotide
tagaattgctttgggaccaga

SEQ ID NO: 396 - RNA, 21 nt, synthetic construct
  source 1..21: mol_type = other RNA
  modified_base 1: mod_base = OTHER; note = Vinyl-phosphonate 2'-O-methyl modified nucleotide with phosphorothioate linkage
  modified_base 2: mod_base = OTHER; note = 2'-fluoro modified nucleotide with phosphorothioate linkage
  modified_base 3: mod_base = OTHER; note = 2'-O-methyl modified nucleotide
  modified_base 4: mod_base = OTHER; note = 2'-O-methyl modified nucleotide
  modified_base 5: mod_base = OTHER; note = 2'-O-methyl modified nucleotide
  modified_base 6: mod_base = OTHER; note = 2'-fluoro modified nucleotide
  modified_base 7: mod_base = OTHER; note = 2'-O-methyl modified nucleotide
  modified_base 8: mod_base = OTHER; note = 2'-fluoro modified nucleotide
  modified_base 9: mod_base = OTHER; note = 2'-fluoro modified nucleotide
  modified_base 10: mod_base = OTHER; note = 2'-O-methyl modified nucleotide
  modified_base 11: mod_base = OTHER; note = 2'-O-methyl modified nucleotide
  modified_base 12: mod_base = OTHER; note = 2'-O-methyl modified nucleotide
  modified_base 13: mod_base = OTHER; note = 2'-O-methyl modified nucleotide
  modified_base 14: mod_base = OTHER; note = 2'-fluoro modified nucleotide
  modified_base 15: mod_base = OTHER; note = 2'-O-methyl modified nucleotide
  modified_base 16: mod_base = OTHER; note = 2'-fluoro modified nucleotide
  modified_base 17: mod_base = OTHER; note = 2'-O-methyl modified nucleotide
  modified_base 18: mod_base = OTHER; note = 2'-O-methyl modified nucleotide
  modified_base 19: mod_base = OTHER; note = 2'-O-methyl modified nucleotide with phosphorothioate linkage
  modified_base 20: mod_base = OTHER; note = 2'-O-methyl modified nucleotide with phosphorothioate linkage
  modified_base 21: mod_base = OTHER; note = 2'-O-methyl modified nucleotide
ttctgatagatgtactggaaa

SEQ ID NO: 397 - RNA, 21 nt, synthetic construct
  source 1..21: mol_type = other RNA
  modified_base 1: mod_base = OTHER; note = Vinyl-phosphonate 2'-O-methyl modified nucleotide with phosphorothioate linkage
  modified_base 2: mod_base = OTHER; note = 2'-fluoro modified nucleotide with phosphorothioate linkage
  modified_base 3: mod_base = OTHER; note = 2'-O-methyl modified nucleotide
  modified_base 4: mod_base = OTHER; note = 2'-O-methyl modified nucleotide
  modified_base 5: mod_base = OTHER; note = 2'-O-methyl modified nucleotide
  modified_base 6: mod_base = OTHER; note = 2'-fluoro modified nucleotide
  modified_base 7: mod_base = OTHER; note = 2'-O-methyl modified nucleotide
  modified_base 8: mod_base = OTHER; note = 2'-fluoro modified nucleotide
  modified_base 9: mod_base = OTHER; note = 2'-fluoro modified nucleotide
  modified_base 10: mod_base = OTHER; note = 2'-O-methyl modified nucleotide
  modified_base 11: mod_base = OTHER; note = 2'-O-methyl modified nucleotide
  modified_base 12: mod_base = OTHER; note = 2'-O-methyl modified nucleotide
  modified_base 13: mod_base = OTHER; note = 2'-O-methyl modified nucleotide
  modified_base 14: mod_base = OTHER; note = 2'-fluoro modified nucleotide
  modified_base 15: mod_base = OTHER; note = 2'-O-methyl modified nucleotide
  modified_base 16: mod_base = OTHER; note = 2'-fluoro modified nucleotide
  modified_base 17: mod_base = OTHER; note = 2'-O-methyl modified nucleotide
  modified_base 18: mod_base = OTHER; note = 2'-O-methyl modified nucleotide
  modified_base 19: mod_base = OTHER; note = 2'-O-methyl modified nucleotide with phosphorothioate linkage
  modified_base 20: mod_base = OTHER; note = 2'-O-methyl modified nucleotide with phosphorothioate linkage
  modified_base 21: mod_base = OTHER; note = 2'-O-methyl modified nucleotide
tttctgatagatgtactggaa

SEQ ID NO: 398 - RNA, 21 nt, synthetic construct
  source 1..21: mol_type = other RNA
  modified_base 1: mod_base = OTHER; note = Vinyl-phosphonate 2'-O-methyl modified nucleotide with phosphorothioate linkage
  modified_base 2: mod_base = OTHER; note = 2'-fluoro modified nucleotide with phosphorothioate linkage
  modified_base 3: mod_base = OTHER; note = 2'-O-methyl modified nucleotide
  modified_base 4: mod_base = OTHER; note = 2'-O-methyl modified nucleotide
  modified_base 5: mod_base = OTHER; note = 2'-O-methyl modified nucleotide
  modified_base 6: mod_base = OTHER; note = 2'-fluoro modified nucleotide
  modified_base 7: mod_base = OTHER; note = 2'-O-methyl modified nucleotide
  modified_base 8: mod_base = OTHER; note = 2'-fluoro modified nucleotide
  modified_base 9: mod_base = OTHER; note = 2'-fluoro modified nucleotide
  modified_base 10: mod_base = OTHER; note = 2'-O-methyl modified nucleotide
  modified_base 11: mod_base = OTHER; note = 2'-O-methyl modified nucleotide
  modified_base 12: mod_base = OTHER; note = 2'-O-methyl modified nucleotide
  modified_base 13: mod_base = OTHER; note = 2'-O-methyl modified nucleotide
  modified_base 14: mod_base = OTHER; note = 2'-fluoro modified nucleotide
  modified_base 15: mod_base = OTHER; note = 2'-O-methyl modified nucleotide
  modified_base 16: mod_base = OTHER; note = 2'-fluoro modified nucleotide
  modified_base 17: mod_base = OTHER; note = 2'-O-methyl modified nucleotide
  modified_base 18: mod_base = OTHER; note = 2'-O-methyl modified nucleotide
  modified_base 19: mod_base = OTHER; note = 2'-O-methyl modified nucleotide with phosphorothioate linkage
  modified_base 20: mod_base = OTHER; note = 2'-O-methyl modified nucleotide with phosphorothioate linkage
  modified_base 21: mod_base = OTHER; note = 2'-O-methyl modified nucleotide
tttgatgattctgatagatgt

SEQ ID NO: 399 - RNA, 21 nt, synthetic construct
  source 1..21: mol_type = other RNA
  modified_base 1: mod_base = OTHER; note = Vinyl-phosphonate 2'-O-methyl modified nucleotide with phosphorothioate linkage
  modified_base 2: mod_base = OTHER; note = 2'-fluoro modified nucleotide with phosphorothioate linkage
  modified_base 3: mod_base = OTHER; note = 2'-O-methyl modified nucleotide
  modified_base 4: mod_base = OTHER; note = 2'-O-methyl modified nucleotide
  modified_base 5: mod_base = OTHER; note = 2'-O-methyl modified nucleotide
  modified_base 6: mod_base = OTHER; note = 2'-fluoro modified nucleotide
  modified_base 7: mod_base = OTHER; note = 2'-O-methyl modified nucleotide
  modified_base 8: mod_base = OTHER; note = 2'-fluoro modified nucleotide
  modified_base 9: mod_base = OTHER; note = 2'-fluoro modified nucleotide
  modified_base 10: mod_base = OTHER; note = 2'-O-methyl modified nucleotide
  modified_base 11: mod_base = OTHER; note = 2'-O-methyl modified nucleotide
  modified_base 12: mod_base = OTHER; note = 2'-O-methyl modified nucleotide
  modified_base 13: mod_base = OTHER; note = 2'-O-methyl modified nucleotide
  modified_base 14: mod_base = OTHER; note = 2'-fluoro modified nucleotide
  modified_base 15: mod_base = OTHER; note = 2'-O-methyl modified nucleotide
  modified_base 16: mod_base = OTHER; note = 2'-fluoro modified nucleotide
  modified_base 17: mod_base = OTHER; note = 2'-O-methyl modified nucleotide
  modified_base 18: mod_base = OTHER; note = 2'-O-methyl modified nucleotide
  modified_base 19: mod_base = OTHER; note = 2'-O-methyl modified nucleotide with phosphorothioate linkage
  modified_base 20: mod_base = OTHER; note = 2'-O-methyl modified nucleotide with phosphorothioate linkage
  modified_base 21: mod_base = OTHER; note = 2'-O-methyl modified nucleotide
ttcaggaattgagtgacttta

SEQ ID NO: 400 - RNA, 21 nt, synthetic construct
  source 1..21: mol_type = other RNA
  modified_base 1: mod_base = OTHER; note = Vinyl-phosphonate 2'-O-methyl modified nucleotide with phosphorothioate linkage
  modified_base 2: mod_base = OTHER; note = 2'-fluoro modified nucleotide with phosphorothioate linkage
  modified_base 3: mod_base = OTHER; note = 2'-O-methyl modified nucleotide
  modified_base 4: mod_base = OTHER; note = 2'-O-methyl modified nucleotide
  modified_base 5: mod_base = OTHER; note = 2'-O-methyl modified nucleotide
  modified_base 6: mod_base = OTHER; note = 2'-fluoro modified nucleotide
  modified_base 7: mod_base = OTHER; note = 2'-O-methyl modified nucleotide
  modified_base 8: mod_base = OTHER; note = 2'-fluoro modified nucleotide
  modified_base 9: mod_base = OTHER; note = 2'-fluoro modified nucleotide
  modified_base 10: mod_base = OTHER; note = 2'-O-methyl modified nucleotide
  modified_base 11: mod_base = OTHER; note = 2'-O-methyl modified nucleotide
  modified_base 12: mod_base = OTHER; note = 2'-O-methyl modified nucleotide
  modified_base 13: mod_base = OTHER; note = 2'-O-methyl modified nucleotide
  modified_base 14: mod_base = OTHER; note = 2'-fluoro modified nucleotide
  modified_base 15: mod_base = OTHER; note = 2'-O-methyl modified nucleotide
  modified_base 16: mod_base = OTHER; note = 2'-fluoro modified nucleotide
  modified_base 17: mod_base = OTHER; note = 2'-O-methyl modified nucleotide
  modified_base 18: mod_base = OTHER; note = 2'-O-methyl modified nucleotide
  modified_base 19: mod_base = OTHER; note = 2'-O-methyl modified nucleotide with phosphorothioate linkage
  modified_base 20: mod_base = OTHER; note = 2'-O-methyl modified nucleotide with phosphorothioate linkage
  modified_base 21: mod_base = OTHER; note = 2'-O-methyl modified nucleotide
ttatattgattagttcaggaa

SEQ ID NO: 401 - RNA, 21 nt, synthetic construct
  source 1..21: mol_type = other RNA
  modified_base 1: mod_base = OTHER; note = Vinyl-phosphonate 2'-O-methyl modified nucleotide with phosphorothioate linkage
  modified_base 2: mod_base = OTHER; note = 2'-fluoro modified nucleotide with phosphorothioate linkage
  modified_base 3: mod_base = OTHER; note = 2'-O-methyl modified nucleotide
  modified_base 4: mod_base = OTHER; note = 2'-O-methyl modified nucleotide
  modified_base 5: mod_base = OTHER; note = 2'-O-methyl modified nucleotide
  modified_base 6: mod_base = OTHER; note = 2'-fluoro modified nucleotide
  modified_base 7: mod_base = OTHER; note = 2'-O-methyl modified nucleotide
  modified_base 8: mod_base = OTHER; note = 2'-fluoro modified nucleotide
  modified_base 9: mod_base = OTHER; note = 2'-fluoro modified nucleotide
  modified_base 10: mod_base = OTHER; note = 2'-O-methyl modified nucleotide
  modified_base 11: mod_base = OTHER; note = 2'-O-methyl modified nucleotide
  modified_base 12: mod_base = OTHER; note = 2'-O-methyl modified nucleotide
  modified_base 13: mod_base = OTHER; note = 2'-O-methyl modified nucleotide
  modified_base 14: mod_base = OTHER; note = 2'-fluoro modified nucleotide
  modified_base 15: mod_base = OTHER; note = 2'-O-methyl modified nucleotide
  modified_base 16: mod_base = OTHER; note = 2'-fluoro modified nucleotide
  modified_base 17: mod_base = OTHER; note = 2'-O-methyl modified nucleotide
  modified_base 18: mod_base = OTHER; note = 2'-O-methyl modified nucleotide
  modified_base 19: mod_base = OTHER; note = 2'-O-methyl modified nucleotide with phosphorothioate linkage
  modified_base 20: mod_base = OTHER; note = 2'-O-methyl modified nucleotide with phosphorothioate linkage
  modified_base 21: mod_base = OTHER; note = 2'-O-methyl modified nucleotide
ttatatattgattagttcagg

SEQ ID NO: 402 - RNA, 21 nt, synthetic construct
  source 1..21: mol_type = other RNA
  modified_base 1: mod_base = OTHER; note = Vinyl-phosphonate 2'-O-methyl modified nucleotide with phosphorothioate linkage
  modified_base 2: mod_base = OTHER; note = 2'-fluoro modified nucleotide with phosphorothioate linkage
  modified_base 3: mod_base = OTHER; note = 2'-O-methyl modified nucleotide
  modified_base 4: mod_base = OTHER; note = 2'-O-methyl modified nucleotide
  modified_base 5: mod_base = OTHER; note = 2'-O-methyl modified nucleotide
  modified_base 6: mod_base = OTHER; note = 2'-fluoro modified nucleotide
  modified_base 7: mod_base = OTHER; note = 2'-O-methyl modified nucleotide
  modified_base 8: mod_base = OTHER; note = 2'-fluoro modified nucleotide
  modified_base 9: mod_base = OTHER; note = 2'-fluoro modified nucleotide
  modified_base 10: mod_base = OTHER; note = 2'-O-methyl modified nucleotide
  modified_base 11: mod_base = OTHER; note = 2'-O-methyl modified nucleotide
  modified_base 12: mod_base = OTHER; note = 2'-O-methyl modified nucleotide
  modified_base 13: mod_base = OTHER; note = 2'-O-methyl modified nucleotide
  modified_base 14: mod_base = OTHER; note = 2'-fluoro modified nucleotide
  modified_base 15: mod_base = OTHER; note = 2'-O-methyl modified nucleotide
  modified_base 16: mod_base = OTHER; note = 2'-fluoro modified nucleotide
  modified_base 17: mod_base = OTHER; note = 2'-O-methyl modified nucleotide
  modified_base 18: mod_base = OTHER; note = 2'-O-methyl modified nucleotide
  modified_base 19: mod_base = OTHER; note = 2'-O-methyl modified nucleotide with phosphorothioate linkage
  modified_base 20: mod_base = OTHER; note = 2'-O-methyl modified nucleotide with phosphorothioate linkage
  modified_base 21: mod_base = OTHER; note = 2'-O-methyl modified nucleotide
ttgcaaggaatgagaaccagg

SEQ ID NO: 403 - RNA, 21 nt, synthetic construct
  source 1..21: mol_type = other RNA
  modified_base 1: mod_base = OTHER; note = Vinyl-phosphonate 2'-O-methyl modified nucleotide with phosphorothioate linkage
  modified_base 2: mod_base = OTHER; note = 2'-fluoro modified nucleotide with phosphorothioate linkage
  modified_base 3: mod_base = OTHER; note = 2'-O-methyl modified nucleotide
  modified_base 4: mod_base = OTHER; note = 2'-O-methyl modified nucleotide
  modified_base 5: mod_base = OTHER; note = 2'-O-methyl modified nucleotide
  modified_base 6: mod_base = OTHER; note = 2'-fluoro modified nucleotide
  modified_base 7: mod_base = OTHER; note = 2'-O-methyl modified nucleotide
  modified_base 8: mod_base = OTHER; note = 2'-fluoro modified nucleotide
  modified_base 9: mod_base = OTHER; note = 2'-fluoro modified nucleotide
  modified_base 10: mod_base = OTHER; note = 2'-O-methyl modified nucleotide
  modified_base 11: mod_base = OTHER; note = 2'-O-methyl modified nucleotide
  modified_base 12: mod_base = OTHER; note = 2'-O-methyl modified nucleotide
  modified_base 13: mod_base = OTHER; note = 2'-O-methyl modified nucleotide
  modified_base 14: mod_base = OTHER; note = 2'-fluoro modified nucleotide
  modified_base 15: mod_base = OTHER; note = 2'-O-methyl modified nucleotide
  modified_base 16: mod_base = OTHER; note = 2'-fluoro modified nucleotide
  modified_base 17: mod_base = OTHER; note = 2'-O-methyl modified nucleotide
  modified_base 18: mod_base = OTHER; note = 2'-O-methyl modified nucleotide
  modified_base 19: mod_base = OTHER; note = 2'-O-methyl modified nucleotide with phosphorothioate linkage
  modified_base 20: mod_base = OTHER; note = 2'-O-methyl modified nucleotide with phosphorothioate linkage
  modified_base 21: mod_base = OTHER; note = 2'-O-methyl modified nucleotide
ttatggtgcaaggaatgagaa

SEQ ID NO: 404 - RNA, 21 nt, synthetic construct
  source 1..21: mol_type = other RNA
  modified_base 1: mod_base = OTHER; note = Vinyl-phosphonate 2'-O-methyl modified nucleotide with phosphorothioate linkage
  modified_base 2: mod_base = OTHER; note = 2'-fluoro modified nucleotide with phosphorothioate linkage
  modified_base 3: mod_base = OTHER; note = 2'-O-methyl modified nucleotide
  modified_base 4: mod_base = OTHER; note = 2'-O-methyl modified nucleotide
  modified_base 5: mod_base = OTHER; note = 2'-O-methyl modified nucleotide
  modified_base 6: mod_base = OTHER; note = 2'-fluoro modified nucleotide
  modified_base 7: mod_base = OTHER; note = 2'-O-methyl modified nucleotide
  modified_base 8: mod_base = OTHER; note = 2'-fluoro modified nucleotide
  modified_base 9: mod_base = OTHER; note = 2'-fluoro modified nucleotide
  modified_base 10: mod_base = OTHER; note = 2'-O-methyl modified nucleotide
  modified_base 11: mod_base = OTHER; note = 2'-O-methyl modified nucleotide
  modified_base 12: mod_base = OTHER; note = 2'-O-methyl modified nucleotide
  modified_base 13: mod_base = OTHER; note = 2'-O-methyl modified nucleotide
  modified_base 14: mod_base = OTHER; note = 2'-fluoro modified nucleotide
  modified_base 15: mod_base = OTHER; note = 2'-O-methyl modified nucleotide
  modified_base 16: mod_base = OTHER; note = 2'-fluoro modified nucleotide
  modified_base 17: mod_base = OTHER; note = 2'-O-methyl modified nucleotide
  modified_base 18: mod_base = OTHER; note = 2'-O-methyl modified nucleotide
  modified_base 19: mod_base = OTHER; note = 2'-O-methyl modified nucleotide with phosphorothioate linkage
  modified_base 20: mod_base = OTHER; note = 2'-O-methyl modified nucleotide with phosphorothioate linkage
  modified_base 21: mod_base = OTHER; note = 2'-O-methyl modified nucleotide
taacccagcagaaagccaata

SEQ ID NO: 405 - RNA, 21 nt, synthetic construct
  source 1..21: mol_type = other RNA
  modified_base 1: mod_base = OTHER; note = Vinyl-phosphonate 2'-O-methyl modified nucleotide with phosphorothioate linkage
  modified_base 2: mod_base = OTHER; note = 2'-fluoro modified nucleotide with phosphorothioate linkage
  modified_base 3: mod_base = OTHER; note = 2'-O-methyl modified nucleotide
  modified_base 4: mod_base = OTHER; note = 2'-O-methyl modified nucleotide
  modified_base 5: mod_base = OTHER; note = 2'-O-methyl modified nucleotide
  modified_base 6: mod_base = OTHER; note = 2'-fluoro modified nucleotide
  modified_base 7: mod_base = OTHER; note = 2'-O-methyl modified nucleotide
  modified_base 8: mod_base = OTHER; note = 2'-fluoro modified nucleotide
  modified_base 9: mod_base = OTHER; note = 2'-fluoro modified nucleotide
  modified_base 10: mod_base = OTHER; note = 2'-O-methyl modified nucleotide
  modified_base 11: mod_base = OTHER; note = 2'-O-methyl modified nucleotide
  modified_base 12: mod_base = OTHER; note = 2'-O-methyl modified nucleotide
  modified_base 13: mod_base = OTHER; note = 2'-O-methyl modified nucleotide
  modified_base 14: mod_base = OTHER; note = 2'-fluoro modified nucleotide
  modified_base 15: mod_base = OTHER; note = 2'-O-methyl modified nucleotide
  modified_base 16: mod_base = OTHER; note = 2'-fluoro modified nucleotide
  modified_base 17: mod_base = OTHER; note = 2'-O-methyl modified nucleotide
  modified_base 18: mod_base = OTHER; note = 2'-O-methyl modified nucleotide
  modified_base 19: mod_base = OTHER; note = 2'-O-methyl modified nucleotide with phosphorothioate linkage
  modified_base 20: mod_base = OTHER; note = 2'-O-methyl modified nucleotide with phosphorothioate linkage
  modified_base 21: mod_base = OTHER; note = 2'-O-methyl modified nucleotide
tggaaaatcatgtagaggagg

SEQ ID NO: 406 - RNA, 21 nt, synthetic construct
  source 1..21: mol_type = other RNA
  modified_base 1: mod_base = OTHER; note = Vinyl-phosphonate 2'-O-methyl modified nucleotide with phosphorothioate linkage
  modified_base 2: mod_base = OTHER; note = 2'-fluoro modified nucleotide with phosphorothioate linkage
  modified_base 3: mod_base = OTHER; note = 2'-O-methyl modified nucleotide
  modified_base 4: mod_base = OTHER; note = 2'-O-methyl modified nucleotide
  modified_base 5: mod_base = OTHER; note = 2'-O-methyl modified nucleotide
  modified_base 6: mod_base = OTHER; note = 2'-fluoro modified nucleotide
  modified_base 7: mod_base = OTHER; note = 2'-O-methyl modified nucleotide
  modified_base 8: mod_base = OTHER; note = 2'-fluoro modified nucleotide
  modified_base 9: mod_base = OTHER; note = 2'-fluoro modified nucleotide
  modified_base 10: mod_base = OTHER; note = 2'-O-methyl modified nucleotide
  modified_base 11: mod_base = OTHER; note = 2'-O-methyl modified nucleotide
  modified_base 12: mod_base = OTHER; note = 2'-O-methyl modified nucleotide
  modified_base 13: mod_base = OTHER; note = 2'-O-methyl modified nucleotide
  modified_base 14: mod_base = OTHER; note = 2'-fluoro modified nucleotide
  modified_base 15: mod_base = OTHER; note = 2'-O-methyl modified nucleotide
  modified_base 16: mod_base = OTHER; note = 2'-fluoro modified nucleotide
  modified_base 17: mod_base = OTHER; note = 2'-O-methyl modified nucleotide
  modified_base 18: mod_base = OTHER; note = 2'-O-methyl modified nucleotide
  modified_base 19: mod_base = OTHER; note = 2'-O-methyl modified nucleotide with phosphorothioate linkage
  modified_base 20: mod_base = OTHER; note = 2'-O-methyl modified nucleotide with phosphorothioate linkage
  modified_base 21: mod_base = OTHER; note = 2'-O-methyl modified nucleotide
tataagtgagccttgatcttg

SEQ ID NO: 407 - RNA, 21 nt, synthetic construct
  source 1..21: mol_type = other RNA
  modified_base 1: mod_base = OTHER; note = Vinyl-phosphonate 2'-O-methyl modified nucleotide with phosphorothioate linkage
  modified_base 2: mod_base = OTHER; note = 2'-fluoro modified nucleotide with phosphorothioate linkage
  modified_base 3: mod_base = OTHER; note = 2'-O-methyl modified nucleotide
  modified_base 4: mod_base = OTHER; note = 2'-O-methyl modified nucleotide
  modified_base 5: mod_base = OTHER; note = 2'-O-methyl modified nucleotide
  modified_base 6: mod_base = OTHER; note = 2'-fluoro modified nucleotide
  modified_base 7: mod_base = OTHER; note = 2'-O-methyl modified nucleotide
  modified_base 8: mod_base = OTHER; note = 2'-fluoro modified nucleotide
  modified_base 9: mod_base = OTHER; note = 2'-fluoro modified nucleotide
  modified_base 10: mod_base = OTHER; note = 2'-O-methyl modified nucleotide
  modified_base 11: mod_base = OTHER; note = 2'-O-methyl modified nucleotide
  modified_base 12: mod_base = OTHER; note = 2'-O-methyl modified nucleotide
  modified_base 13: mod_base = OTHER; note = 2'-O-methyl modified nucleotide
  modified_base 14: mod_base = OTHER; note = 2'-fluoro modified nucleotide
  modified_base 15: mod_base = OTHER; note = 2'-O-methyl modified nucleotide
  modified_base 16: mod_base = OTHER; note = 2'-fluoro modified nucleotide
  modified_base 17: mod_base = OTHER; note = 2'-O-methyl modified nucleotide
  modified_base 18: mod_base = OTHER; note = 2'-O-methyl modified nucleotide
  modified_base 19: mod_base = OTHER; note = 2'-O-methyl modified nucleotide with phosphorothioate linkage
  modified_base 20: mod_base = OTHER; note = 2'-O-methyl modified nucleotide with phosphorothioate linkage
  modified_base 21: mod_base = OTHER; note = 2'-O-methyl modified nucleotide
ttggtcatcacaatgctgagg

SEQ ID NO: 408 - RNA, 21 nt, synthetic construct
  source 1..21: mol_type = other RNA
  modified_base 1: mod_base = OTHER; note = Vinyl-phosphonate 2'-O-methyl modified nucleotide with phosphorothioate linkage
  modified_base 2: mod_base = OTHER; note = 2'-fluoro modified nucleotide with phosphorothioate linkage
  modified_base 3: mod_base = OTHER; note = 2'-O-methyl modified nucleotide
  modified_base 4: mod_base = OTHER; note = 2'-O-methyl modified nucleotide
  modified_base 5: mod_base = OTHER; note = 2'-O-methyl modified nucleotide
  modified_base 6: mod_base = OTHER; note = 2'-fluoro modified nucleotide
  modified_base 7: mod_base = OTHER; note = 2'-O-methyl modified nucleotide
  modified_base 8: mod_base = OTHER; note = 2'-fluoro modified nucleotide
  modified_base 9: mod_base = OTHER; note = 2'-fluoro modified nucleotide
  modified_base 10: mod_base = OTHER; note = 2'-O-methyl modified nucleotide
  modified_base 11: mod_base = OTHER; note = 2'-O-methyl modified nucleotide
  modified_base 12: mod_base = OTHER; note = 2'-O-methyl modified nucleotide
  modified_base 13: mod_base = OTHER; note = 2'-O-methyl modified nucleotide
  modified_base 14: mod_base = OTHER; note = 2'-fluoro modified nucleotide
  modified_base 15: mod_base = OTHER; note = 2'-O-methyl modified nucleotide
  modified_base 16: mod_base = OTHER; note = 2'-fluoro modified nucleotide
  modified_base 17: mod_base = OTHER; note = 2'-O-methyl modified nucleotide
  modified_base 18: mod_base = OTHER; note = 2'-O-methyl modified nucleotide
  modified_base 19: mod_base = OTHER; note = 2'-O-methyl modified nucleotide with phosphorothioate linkage
  modified_base 20: mod_base = OTHER; note = 2'-O-methyl modified nucleotide with phosphorothioate linkage
  modified_base 21: mod_base = OTHER; note = 2'-O-methyl modified nucleotide
ttgcacaagagaatgatgatc

SEQ ID NO: 409 - RNA, 21 nt, synthetic construct
  source 1..21: mol_type = other RNA
  modified_base 1: mod_base = OTHER; note = Vinyl-phosphonate 2'-O-methyl modified nucleotide with phosphorothioate linkage
  modified_base 2: mod_base = OTHER; note = 2'-fluoro modified nucleotide with phosphorothioate linkage
  modified_base 3: mod_base = OTHER; note = 2'-O-methyl modified nucleotide
  modified_base 4: mod_base = OTHER; note = 2'-O-methyl modified nucleotide
  modified_base 5: mod_base = OTHER; note = 2'-O-methyl modified nucleotide
  modified_base 6: mod_base = OTHER; note = 2'-fluoro modified nucleotide
  modified_base 7: mod_base = OTHER; note = 2'-O-methyl modified nucleotide
  modified_base 8: mod_base = OTHER; note = 2'-fluoro modified nucleotide
  modified_base 9: mod_base = OTHER; note = 2'-fluoro modified nucleotide
  modified_base 10: mod_base = OTHER; note = 2'-O-methyl modified nucleotide
  modified_base 11: mod_base = OTHER; note = 2'-O-methyl modified nucleotide
  modified_base 12: mod_base = OTHER; note = 2'-O-methyl modified nucleotide
  modified_base 13: mod_base = OTHER; note = 2'-O-methyl modified nucleotide
  modified_base 14: mod_base = OTHER; note = 2'-fluoro modified nucleotide
  modified_base 15: mod_base = OTHER; note = 2'-O-methyl modified nucleotide
  modified_base 16: mod_base = OTHER; note = 2'-fluoro modified nucleotide
  modified_base 17: mod_base = OTHER; note = 2'-O-methyl modified nucleotide
  modified_base 18: mod_base = OTHER; note = 2'-O-methyl modified nucleotide
  modified_base 19: mod_base = OTHER; note = 2'-O-methyl modified nucleotide with phosphorothioate linkage
  modified_base 20: mod_base = OTHER; note = 2'-O-methyl modified nucleotide with phosphorothioate linkage
  modified_base 21: mod_base = OTHER; note = 2'-O-methyl modified nucleotide
tagagaactgtgacggccaca

SEQ ID NO: 410 - RNA, 21 nt, synthetic construct
  source 1..21: mol_type = other RNA
  modified_base 1: mod_base = OTHER; note = Vinyl-phosphonate 2'-O-methyl modified nucleotide with phosphorothioate linkage
  modified_base 2: mod_base = OTHER; note = 2'-fluoro modified nucleotide with phosphorothioate linkage
  modified_base 3: mod_base = OTHER; note = 2'-O-methyl modified nucleotide
  modified_base 4: mod_base = OTHER; note = 2'-O-methyl modified nucleotide
  modified_base 5: mod_base = OTHER; note = 2'-O-methyl modified nucleotide
  modified_base 6: mod_base = OTHER; note = 2'-fluoro modified nucleotide
  modified_base 7: mod_base = OTHER; note = 2'-O-methyl modified nucleotide
  modified_base 8: mod_base = OTHER; note = 2'-fluoro modified nucleotide
  modified_base 9: mod_base = OTHER; note = 2'-fluoro modified nucleotide
  modified_base 10: mod_base = OTHER; note = 2'-O-methyl modified nucleotide
  modified_base 11: mod_base = OTHER; note = 2'-O-methyl modified nucleotide
  modified_base 12: mod_base = OTHER; note = 2'-O-methyl modified nucleotide
  modified_base 13: mod_base = OTHER; note = 2'-O-methyl modified nucleotide
  modified_base 14: mod_base = OTHER; note = 2'-fluoro modified nucleotide
  modified_base 15: mod_base = OTHER; note = 2'-O-methyl modified nucleotide
  modified_base 16: mod_base = OTHER; note = 2'-fluoro modified nucleotide
  modified_base 17: mod_base = OTHER; note = 2'-O-methyl modified nucleotide
  modified_base 18: mod_base = OTHER; note = 2'-O-methyl modified nucleotide
  modified_base 19: mod_base = OTHER; note = 2'-O-methyl modified nucleotide with phosphorothioate linkage
  modified_base 20: mod_base = OTHER; note = 2'-O-methyl modified nucleotide with phosphorothioate linkage
  modified_base 21: mod_base = OTHER; note = 2'-O-methyl modified nucleotide
tagaattgctttgggaccaga

SEQ ID NO: 411 - RNA, 21 nt, synthetic construct
  source 1..21: mol_type = other RNA
  modified_base 1: mod_base = OTHER; note = Vinyl-phosphonate 2'-O-methyl modified nucleotide with phosphorothioate linkage
  modified_base 2: mod_base = OTHER; note = 2'-fluoro modified nucleotide with phosphorothioate linkage
  modified_base 3: mod_base = OTHER; note = 2'-O-methyl modified nucleotide
  modified_base 4: mod_base = OTHER; note = 2'-O-methyl modified nucleotide
  modified_base 5: mod_base = OTHER; note = 2'-O-methyl modified nucleotide
  modified_base 6: mod_base = OTHER; note = 2'-fluoro modified nucleotide
  modified_base 7: mod_base = OTHER; note = 2'-O-methyl modified nucleotide
  modified_base 8: mod_base = OTHER; note = 2'-fluoro modified nucleotide
  modified_base 9: mod_base = OTHER; note = 2'-fluoro modified nucleotide
  modified_base 10: mod_base = OTHER; note = 2'-O-methyl modified nucleotide
  modified_base 11: mod_base = OTHER; note = 2'-O-methyl modified nucleotide
  modified_base 12: mod_base = OTHER; note = 2'-O-methyl modified nucleotide
  modified_base 13: mod_base = OTHER; note = 2'-O-methyl modified nucleotide
  modified_base 14: mod_base = OTHER; note = 2'-fluoro modified nucleotide
  modified_base 15: mod_base = OTHER; note = 2'-O-methyl modified nucleotide
  modified_base 16: mod_base = OTHER; note = 2'-fluoro modified nucleotide
  modified_base 17: mod_base = OTHER; note = 2'-O-methyl modified nucleotide
  modified_base 18: mod_base = OTHER; note = 2'-O-methyl modified nucleotide
  modified_base 19: mod_base = OTHER; note = 2'-O-methyl modified nucleotide with phosphorothioate linkage
  modified_base 20: mod_base = OTHER; note = 2'-O-methyl modified nucleotide with phosphorothioate linkage
  modified_base 21: mod_base = OTHER; note = 2'-O-methyl modified nucleotide
ttctgatagatgtactggaaa

SEQ ID NO: 412 - RNA, 21 nt, synthetic construct
  source 1..21: mol_type = other RNA
  modified_base 1: mod_base = OTHER; note = Vinyl-phosphonate 2'-O-methyl modified nucleotide with phosphorothioate linkage
  modified_base 2: mod_base = OTHER; note = 2'-fluoro modified nucleotide with phosphorothioate linkage
  modified_base 3: mod_base = OTHER; note = 2'-O-methyl modified nucleotide
  modified_base 4: mod_base = OTHER; note = 2'-O-methyl modified nucleotide
  modified_base 5: mod_base = OTHER; note = 2'-O-methyl modified nucleotide
  modified_base 6: mod_base = OTHER; note = 2'-fluoro modified nucleotide
  modified_base 7: mod_base = OTHER; note = 2'-O-methyl modified nucleotide
  modified_base 8: mod_base = OTHER; note = 2'-fluoro modified nucleotide
  modified_base 9: mod_base = OTHER; note = 2'-fluoro modified nucleotide
  modified_base 10: mod_base = OTHER; note = 2'-O-methyl modified nucleotide
  modified_base 11: mod_base = OTHER; note = 2'-O-methyl modified nucleotide
  modified_base 12: mod_base = OTHER; note = 2'-O-methyl modified nucleotide
  modified_base 13: mod_base = OTHER; note = 2'-O-methyl modified nucleotide
  modified_base 14: mod_base = OTHER; note = 2'-fluoro modified nucleotide
  modified_base 15: mod_base = OTHER; note = 2'-O-methyl modified nucleotide
  modified_base 16: mod_base = OTHER; note = 2'-fluoro modified nucleotide
  modified_base 17: mod_base = OTHER; note = 2'-O-methyl modified nucleotide
  modified_base 18: mod_base = OTHER; note = 2'-O-methyl modified nucleotide
  modified_base 19: mod_base = OTHER; note = 2'-O-methyl modified nucleotide with phosphorothioate linkage
  modified_base 20: mod_base = OTHER; note = 2'-O-methyl modified nucleotide with phosphorothioate linkage
  modified_base 21: mod_base = OTHER; note = 2'-O-methyl modified nucleotide
tttctgatagatgtactggaa

SEQ ID NO: 413 - RNA, 21 nt, synthetic construct
  source 1..21: mol_type = other RNA
  modified_base 1: mod_base = OTHER; note = Vinyl-phosphonate 2'-O-methyl modified nucleotide with phosphorothioate linkage
  modified_base 2: mod_base = OTHER; note = 2'-fluoro modified nucleotide with phosphorothioate linkage
  modified_base 3: mod_base = OTHER; note = 2'-O-methyl modified nucleotide
  modified_base 4: mod_base = OTHER; note = 2'-O-methyl modified nucleotide
  modified_base 5: mod_base = OTHER; note = 2'-O-methyl modified nucleotide
  modified_base 6: mod_base = OTHER; note = 2'-fluoro modified nucleotide
  modified_base 7: mod_base = OTHER; note = 2'-O-methyl modified nucleotide
  modified_base 8: mod_base = OTHER; note = 2'-fluoro modified nucleotide
  modified_base 9: mod_base = OTHER; note = 2'-fluoro modified nucleotide
  modified_base 10: mod_base = OTHER; note = 2'-O-methyl modified nucleotide
  modified_base 11: mod_base = OTHER; note = 2'-O-methyl modified nucleotide
  modified_base 12: mod_base = OTHER; note = 2'-O-methyl modified nucleotide
  modified_base 13: mod_base = OTHER; note = 2'-O-methyl modified nucleotide
  modified_base 14: mod_base = OTHER; note = 2'-fluoro modified nucleotide
  modified_base 15: mod_base = OTHER; note = 2'-O-methyl modified nucleotide
  modified_base 16: mod_base = OTHER; note = 2'-fluoro modified nucleotide
  modified_base 17: mod_base = OTHER; note = 2'-O-methyl modified nucleotide
  modified_base 18: mod_base = OTHER; note = 2'-O-methyl modified nucleotide
  modified_base 19: mod_base = OTHER; note = 2'-O-methyl modified nucleotide with phosphorothioate linkage
  modified_base 20: mod_base = OTHER; note = 2'-O-methyl modified nucleotide with phosphorothioate linkage
  modified_base 21: mod_base = OTHER; note = 2'-O-methyl modified nucleotide
tttgatgattctgatagatgt

SEQ ID NO: 414 - RNA, 21 nt, synthetic construct
  source 1..21: mol_type = other RNA
  modified_base 1: mod_base = OTHER; note = Vinyl-phosphonate 2'-O-methyl modified nucleotide with phosphorothioate linkage
  modified_base 2: mod_base = OTHER; note = 2'-fluoro modified nucleotide with phosphorothioate linkage
  modified_base 3: mod_base = OTHER; note = 2'-O-methyl modified nucleotide
  modified_base 4: mod_base = OTHER; note = 2'-O-methyl modified nucleotide
  modified_base 5: mod_base = OTHER; note = 2'-O-methyl modified nucleotide
  modified_base 6: mod_base = OTHER; note = 2'-fluoro modified nucleotide
  modified_base 7: mod_base = OTHER; note = 2'-O-methyl modified nucleotide
  modified_base 8: mod_base = OTHER; note = 2'-fluoro modified nucleotide
  modified_base 9: mod_base = OTHER; note = 2'-fluoro modified nucleotide
  modified_base 10: mod_base = OTHER; note = 2'-O-methyl modified nucleotide
  modified_base 11: mod_base = OTHER; note = 2'-O-methyl modified nucleotide
  modified_base 12: mod_base = OTHER; note = 2'-O-methyl modified nucleotide
  modified_base 13: mod_base = OTHER; note = 2'-O-methyl modified nucleotide
  modified_base 14: mod_base = OTHER; note = 2'-fluoro modified nucleotide
  modified_base 15: mod_base = OTHER; note = 2'-O-methyl modified nucleotide
  modified_base 16: mod_base = OTHER; note = 2'-fluoro modified nucleotide
  modified_base 17: mod_base = OTHER; note = 2'-O-methyl modified nucleotide
  modified_base 18: mod_base = OTHER; note = 2'-O-methyl modified nucleotide
  modified_base 19: mod_base = OTHER; note = 2'-O-methyl modified nucleotide with phosphorothioate linkage
  modified_base 20: mod_base = OTHER; note = 2'-O-methyl modified nucleotide with phosphorothioate linkage
  modified_base 21: mod_base = OTHER; note = 2'-O-methyl modified nucleotide
ttcaggaattgagtgacttta

SEQ ID NO: 415 - RNA, 21 nt, synthetic construct
  source 1..21: mol_type = other RNA
  modified_base 1: mod_base = OTHER; note = Vinyl-phosphonate 2'-O-methyl modified nucleotide with phosphorothioate linkage
  modified_base 2: mod_base = OTHER; note = 2'-fluoro modified nucleotide with phosphorothioate linkage
  modified_base 3: mod_base = OTHER; note = 2'-O-methyl modified nucleotide
  modified_base 4: mod_base = OTHER; note = 2'-O-methyl modified nucleotide
  modified_base 5: mod_base = OTHER; note = 2'-O-methyl modified nucleotide
  modified_base 6: mod_base = OTHER; note = 2'-fluoro modified nucleotide
  modified_base 7: mod_base = OTHER; note = 2'-O-methyl modified nucleotide
  modified_base 8: mod_base = OTHER; note = 2'-fluoro modified nucleotide
  modified_base 9: mod_base = OTHER; note = 2'-fluoro modified nucleotide
  modified_base 10: mod_base = OTHER; note = 2'-O-methyl modified nucleotide
  modified_base 11: mod_base = OTHER; note = 2'-O-methyl modified nucleotide
  modified_base 12: mod_base = OTHER; note = 2'-O-methyl modified nucleotide
  modified_base 13: mod_base = OTHER; note = 2'-O-methyl modified nucleotide
  modified_base 14: mod_base = OTHER; note = 2'-fluoro modified nucleotide
  modified_base 15: mod_base = OTHER; note = 2'-O-methyl modified nucleotide
  modified_base 16: mod_base = OTHER; note = 2'-fluoro modified nucleotide
  modified_base 17: mod_base = OTHER; note = 2'-O-methyl modified nucleotide
  modified_base 18: mod_base = OTHER; note = 2'-O-methyl modified nucleotide
  modified_base 19: mod_base = OTHER; note = 2'-O-methyl modified nucleotide with phosphorothioate linkage
  modified_base 20: mod_base = OTHER; note = 2'-O-methyl modified nucleotide with phosphorothioate linkage
  modified_base 21: mod_base = OTHER; note = 2'-O-methyl modified nucleotide
ttatattgattagttcaggaa

SEQ ID NO: 416 - RNA, 21 nt, synthetic construct
  source 1..21: mol_type = other RNA
  modified_base 1: mod_base = OTHER; note = Vinyl-phosphonate 2'-O-methyl modified nucleotide with phosphorothioate linkage
  modified_base 2: mod_base = OTHER; note = 2'-fluoro modified nucleotide with phosphorothioate linkage
  modified_base 3: mod_base = OTHER; note = 2'-O-methyl modified nucleotide
  modified_base 4: mod_base = OTHER; note = 2'-O-methyl modified nucleotide
  modified_base 5: mod_base = OTHER; note = 2'-O-methyl modified nucleotide
  modified_base 6: mod_base = OTHER; note = 2'-fluoro modified nucleotide
  modified_base 7: mod_base = OTHER; note = 2'-O-methyl modified nucleotide
  modified_base 8: mod_base = OTHER; note = 2'-fluoro modified nucleotide
  modified_base 9: mod_base = OTHER; note = 2'-fluoro modified nucleotide
  modified_base 10: mod_base = OTHER; note = 2'-O-methyl modified nucleotide
  modified_base 11: mod_base = OTHER; note = 2'-O-methyl modified nucleotide
  modified_base 12: mod_base = OTHER; note = 2'-O-methyl modified nucleotide
  modified_base 13: mod_base = OTHER; note = 2'-O-methyl modified nucleotide
  modified_base 14: mod_base = OTHER; note = 2'-fluoro modified nucleotide
  modified_base 15: mod_base = OTHER; note = 2'-O-methyl modified nucleotide
  modified_base 16: mod_base = OTHER; note = 2'-fluoro modified nucleotide
  modified_base 17: mod_base = OTHER; note = 2'-O-methyl modified nucleotide
  modified_base 18: mod_base = OTHER; note = 2'-O-methyl modified nucleotide
  modified_base 19: mod_base = OTHER; note = 2'-O-methyl modified nucleotide with phosphorothioate linkage
  modified_base 20: mod_base = OTHER; note = 2'-O-methyl modified nucleotide with phosphorothioate linkage
  modified_base 21: mod_base = OTHER; note = 2'-O-methyl modified nucleotide
ttatatattgattagttcagg

SEQ ID NO: 417 - RNA, 21 nt, synthetic construct
  source 1..21: mol_type = other RNA
  modified_base 1: mod_base = OTHER; note = Vinyl-phosphonate 2'-O-methyl modified nucleotide with phosphorothioate linkage
  modified_base 2: mod_base = OTHER; note = 2'-fluoro modified nucleotide with phosphorothioate linkage
  modified_base 3: mod_base = OTHER; note = 2'-O-methyl modified nucleotide
  modified_base 4: mod_base = OTHER; note = 2'-O-methyl modified nucleotide
  modified_base 5: mod_base = OTHER; note = 2'-O-methyl modified nucleotide
  modified_base 6: mod_base = OTHER; note = 2'-fluoro modified nucleotide
  modified_base 7: mod_base = OTHER; note = 2'-O-methyl modified nucleotide
  modified_base 8: mod_base = OTHER; note = 2'-fluoro modified nucleotide
  modified_base 9: mod_base = OTHER; note = 2'-fluoro modified nucleotide
  modified_base 10: mod_base = OTHER; note = 2'-O-methyl modified nucleotide
  modified_base 11: mod_base = OTHER; note = 2'-O-methyl modified nucleotide
  modified_base 12: mod_base = OTHER; note = 2'-O-methyl modified nucleotide
  modified_base 13: mod_base = OTHER; note = 2'-O-methyl modified nucleotide
  modified_base 14: mod_base = OTHER; note = 2'-fluoro modified nucleotide
  modified_base 15: mod_base = OTHER; note = 2'-O-methyl modified nucleotide
  modified_base 16: mod_base = OTHER; note = 2'-fluoro modified nucleotide
  modified_base 17: mod_base = OTHER; note = 2'-O-methyl modified nucleotide
  modified_base 18: mod_base = OTHER; note = 2'-O-methyl modified nucleotide
  modified_base 19: mod_base = OTHER; note = 2'-O-methyl modified nucleotide with phosphorothioate linkage
  modified_base 20: mod_base = OTHER; note = 2'-O-methyl modified nucleotide with phosphorothioate linkage
  modified_base 21: mod_base = OTHER; note = 2'-O-methyl modified nucleotide
ttgcaaggaatgagaaccagg

SEQ ID NO: 418 - RNA, 21 nt, synthetic construct
  source 1..21: mol_type = other RNA
  modified_base 1: mod_base = OTHER; note = Vinyl-phosphonate 2'-O-methyl modified nucleotide with phosphorothioate linkage
  modified_base 2: mod_base = OTHER; note = 2'-fluoro modified nucleotide with phosphorothioate linkage
  modified_base 3: mod_base = OTHER; note = 2'-O-methyl modified nucleotide
  modified_base 4: mod_base = OTHER; note = 2'-O-methyl modified nucleotide
  modified_base 5: mod_base = OTHER; note = 2'-O-methyl modified nucleotide
  modified_base 6: mod_base = OTHER; note = 2'-fluoro modified nucleotide
  modified_base 7: mod_base = OTHER; note = 2'-O-methyl modified nucleotide
  modified_base 8: mod_base = OTHER; note = 2'-fluoro modified nucleotide
  modified_base 9: mod_base = OTHER; note = 2'-fluoro modified nucleotide
  modified_base 10: mod_base = OTHER; note = 2'-O-methyl modified nucleotide
  modified_base 11: mod_base = OTHER; note = 2'-O-methyl modified nucleotide
  modified_base 12: mod_base = OTHER; note = 2'-O-methyl modified nucleotide
  modified_base 13: mod_base = OTHER; note = 2'-O-methyl modified nucleotide
  modified_base 14: mod_base = OTHER; note = 2'-fluoro modified nucleotide
  modified_base 15: mod_base = OTHER; note = 2'-O-methyl modified nucleotide
  modified_base 16: mod_base = OTHER; note = 2'-fluoro modified nucleotide
  modified_base 17: mod_base = OTHER; note = 2'-O-methyl modified nucleotide
  modified_base 18: mod_base = OTHER; note = 2'-O-methyl modified nucleotide
  modified_base 19: mod_base = OTHER; note = 2'-O-methyl modified nucleotide with phosphorothioate linkage
  modified_base 20: mod_base = OTHER; note = 2'-O-methyl modified nucleotide with phosphorothioate linkage
  modified_base 21: mod_base = OTHER; note = 2'-O-methyl modified nucleotide
ttatggtgcaaggaatgagaa

SEQ ID NO: 419 - RNA, 21 nt, synthetic construct
  source 1..21: mol_type = other RNA
  modified_base 1: mod_base = OTHER; note = Vinyl-phosphonate 2'-O-methyl modified nucleotide with phosphorothioate linkage
  modified_base 2: mod_base = OTHER; note = 2'-fluoro modified nucleotide with phosphorothioate linkage
  modified_base 3: mod_base = OTHER; note = 2'-O-methyl modified nucleotide
  modified_base 4: mod_base = OTHER; note = 2'-O-methyl modified nucleotide
  modified_base 5: mod_base = OTHER; note = 2'-O-methyl modified nucleotide
  modified_base 6: mod_base = OTHER; note = 2'-fluoro modified nucleotide
  modified_base 7: mod_base = OTHER; note = 2'-O-methyl modified nucleotide
  modified_base 8: mod_base = OTHER; note = 2'-fluoro modified nucleotide
  modified_base 9: mod_base = OTHER; note = 2'-fluoro modified nucleotide
  modified_base 10: mod_base = OTHER; note = 2'-O-methyl modified nucleotide
  modified_base 11: mod_base = OTHER; note = 2'-O-methyl modified nucleotide
  modified_base 12: mod_base = OTHER; note = 2'-O-methyl modified nucleotide
  modified_base 13: mod_base = OTHER; note = 2'-O-methyl modified nucleotide
  modified_base 14: mod_base = OTHER; note = 2'-fluoro modified nucleotide
  modified_base 15: mod_base = OTHER; note = 2'-O-methyl modified nucleotide
  modified_base 16: mod_base = OTHER; note = 2'-fluoro modified nucleotide
  modified_base 17: mod_base = OTHER; note = 2'-O-methyl modified nucleotide
  modified_base 18: mod_base = OTHER; note = 2'-O-methyl modified nucleotide
  modified_base 19: mod_base = OTHER; note = 2'-O-methyl modified nucleotide with phosphorothioate linkage
  modified_base 20: mod_base = OTHER; note = 2'-O-methyl modified nucleotide with phosphorothioate linkage
  modified_base 21: mod_base = OTHER; note = 2'-O-methyl modified nucleotide
taacccagcagaaagccaata

SEQ ID NO: 420 - RNA, 21 nt, synthetic construct
  source 1..21: mol_type = other RNA
  modified_base 1: mod_base = OTHER; note = Vinyl-phosphonate 2'-O-methyl modified nucleotide with phosphorothioate linkage
  modified_base 2: mod_base = OTHER; note = 2'-fluoro modified nucleotide with phosphorothioate linkage
  modified_base 3: mod_base = OTHER; note = 2'-O-methyl modified nucleotide
  modified_base 4: mod_base = OTHER; note = 2'-O-methyl modified nucleotide
  modified_base 5: mod_base = OTHER; note = 2'-O-methyl modified nucleotide
  modified_base 6: mod_base = OTHER; note = 2'-fluoro modified nucleotide
  modified_base 7: mod_base = OTHER; note = 2'-O-methyl modified nucleotide
  modified_base 8: mod_base = OTHER; note = 2'-fluoro modified nucleotide
  modified_base 9: mod_base = OTHER; note = 2'-fluoro modified nucleotide
  modified_base 10: mod_base = OTHER; note = 2'-O-methyl modified nucleotide
  modified_base 11: mod_base = OTHER; note = 2'-O-methyl modified nucleotide
  modified_base 12: mod_base = OTHER; note = 2'-O-methyl modified nucleotide
  modified_base 13: mod_base = OTHER; note = 2'-O-methyl modified nucleotide
  modified_base 14: mod_base = OTHER; note = 2'-fluoro modified nucleotide
  modified_base 15: mod_base = OTHER; note = 2'-O-methyl modified nucleotide
  modified_base 16: mod_base = OTHER; note = 2'-fluoro modified nucleotide
  modified_base 17: mod_base = OTHER; note = 2'-O-methyl modified nucleotide
  modified_base 18: mod_base = OTHER; note = 2'-O-methyl modified nucleotide
  modified_base 19: mod_base = OTHER; note = 2'-O-methyl modified nucleotide with phosphorothioate linkage
  modified_base 20: mod_base = OTHER; note = 2'-O-methyl modified nucleotide with phosphorothioate linkage
  modified_base 21: mod_base = OTHER; note = 2'-O-methyl modified nucleotide
tggaaaatcatgtagaggagg

SEQ ID NO: 421 - RNA, 21 nt, synthetic construct
  source 1..21: mol_type = other RNA
  modified_base 1: mod_base = OTHER; note = Vinyl-phosphonate 2'-O-methyl modified nucleotide with phosphorothioate linkage
  modified_base 2: mod_base = OTHER; note = 2'-fluoro modified nucleotide with phosphorothioate linkage
  modified_base 3: mod_base = OTHER; note = 2'-O-methyl modified nucleotide
  modified_base 4: mod_base = OTHER; note = 2'-O-methyl modified nucleotide
  modified_base 5: mod_base = OTHER; note = 2'-O-methyl modified nucleotide
  modified_base 6: mod_base = OTHER; note = 2'-fluoro modified nucleotide
  modified_base 7: mod_base = OTHER; note = 2'-O-methyl modified nucleotide
  modified_base 8: mod_base = OTHER; note = 2'-O-methyl modified nucleotide
  modified_base 9: mod_base = OTHER; note = 2'-O-methyl modified nucleotide
  modified_base 10: mod_base = OTHER; note = 2'-O-methyl modified nucleotide
  modified_base 11: mod_base = OTHER; note = 2'-O-methyl modified nucleotide
  modified_base 12: mod_base = OTHER; note = 2'-O-methyl modified nucleotide
  modified_base 13: mod_base = OTHER; note = 2'-O-methyl modified nucleotide
  modified_base 14: mod_base = OTHER; note = 2'-fluoro modified nucleotide
  modified_base 15: mod_base = OTHER; note = 2'-O-methyl modified nucleotide
  modified_base 16: mod_base = OTHER; note = 2'-fluoro modified nucleotide
  modified_base 17: mod_base = OTHER; note = 2'-O-methyl modified nucleotide
  modified_base 18: mod_base = OTHER; note = 2'-O-methyl modified nucleotide
  modified_base 19: mod_base = OTHER; note = 2'-O-methyl modified nucleotide with phosphorothioate linkage
  modified_base 20: mod_base = OTHER; note = 2'-O-methyl modified nucleotide with phosphorothioate linkage
  modified_base 21: mod_base = OTHER; note = 2'-O-methyl modified nucleotide
tataagtgagccttgatcttg

SEQ ID NO: 422 - RNA, 21 nt, synthetic construct
  source 1..21: mol_type = other RNA
  modified_base 1: mod_base = OTHER; note = Vinyl-phosphonate 2'-O-methyl modified nucleotide with phosphorothioate linkage
  modified_base 2: mod_base = OTHER; note = 2'-fluoro modified nucleotide with phosphorothioate linkage
  modified_base 3: mod_base = OTHER; note = 2'-O-methyl modified nucleotide
  modified_base 4: mod_base = OTHER; note = 2'-O-methyl modified nucleotide
  modified_base 5: mod_base = OTHER; note = 2'-O-methyl modified nucleotide
  modified_base 6: mod_base = OTHER; note = 2'-fluoro modified nucleotide
  modified_base 7: mod_base = OTHER; note = 2'-O-methyl modified nucleotide
  modified_base 8: mod_base = OTHER; note = 2'-O-methyl modified nucleotide
  modified_base 9: mod_base = OTHER; note = 2'-O-methyl modified nucleotide
  modified_base 10: mod_base = OTHER; note = 2'-O-methyl modified nucleotide
  modified_base 11: mod_base = OTHER; note = 2'-O-methyl modified nucleotide
  modified_base 12: mod_base = OTHER; note = 2'-O-methyl modified nucleotide
  modified_base 13: mod_base = OTHER; note = 2'-O-methyl modified nucleotide
  modified_base 14: mod_base = OTHER; note = 2'-fluoro modified nucleotide
  modified_base 15: mod_base = OTHER; note = 2'-O-methyl modified nucleotide
  modified_base 16: mod_base = OTHER; note = 2'-fluoro modified nucleotide
  modified_base 17: mod_base = OTHER; note = 2'-O-methyl modified nucleotide
  modified_base 18: mod_base = OTHER; note = 2'-O-methyl modified nucleotide
  modified_base 19: mod_base = OTHER; note = 2'-O-methyl modified nucleotide with phosphorothioate linkage
  modified_base 20: mod_base = OTHER; note = 2'-O-methyl modified nucleotide with phosphorothioate linkage
  modified_base 21: mod_base = OTHER; note = 2'-O-methyl modified nucleotide
ttggtcatcacaatgctgagg

SEQ ID NO: 423 - RNA, 21 nt, synthetic construct
  source 1..21: mol_type = other RNA
  modified_base 1: mod_base = OTHER; note = Vinyl-phosphonate 2'-O-methyl modified nucleotide with phosphorothioate linkage
  modified_base 2: mod_base = OTHER; note = 2'-fluoro modified nucleotide with phosphorothioate linkage
  modified_base 3: mod_base = OTHER; note = 2'-O-methyl modified nucleotide
  modified_base 4: mod_base = OTHER; note = 2'-O-methyl modified nucleotide
  modified_base 5: mod_base = OTHER; note = 2'-O-methyl modified nucleotide
  modified_base 6: mod_base = OTHER; note = 2'-fluoro modified nucleotide
  modified_base 7: mod_base = OTHER; note = 2'-O-methyl modified nucleotide
  modified_base 8: mod_base = OTHER; note = 2'-O-methyl modified nucleotide
  modified_base 9: mod_base = OTHER; note = 2'-O-methyl modified nucleotide
  modified_base 10: mod_base = OTHER; note = 2'-O-methyl modified nucleotide
  modified_base 11: mod_base = OTHER; note = 2'-O-methyl modified nucleotide
  modified_base 12: mod_base = OTHER; note = 2'-O-methyl modified nucleotide
  modified_base 13: mod_base = OTHER; note = 2'-O-methyl modified nucleotide
  modified_base 14: mod_base = OTHER; note = 2'-fluoro modified nucleotide
  modified_base 15: mod_base = OTHER; note = 2'-O-methyl modified nucleotide
  modified_base 16: mod_base = OTHER; note = 2'-fluoro modified nucleotide
  modified_base 17: mod_base = OTHER; note = 2'-O-methyl modified nucleotide
  modified_base 18: mod_base = OTHER; note = 2'-O-methyl modified nucleotide
  modified_base 19: mod_base = OTHER; note = 2'-O-methyl modified nucleotide with phosphorothioate linkage
  modified_base 20: mod_base = OTHER; note = 2'-O-methyl modified nucleotide with phosphorothioate linkage
  modified_base 21: mod_base = OTHER; note = 2'-O-methyl modified nucleotide
ttgcacaagagaatgatgatc

SEQ ID NO: 424 - RNA, 21 nt, synthetic construct
  source 1..21: mol_type = other RNA
  modified_base 1: mod_base = OTHER; note = Vinyl-phosphonate 2'-O-methyl modified nucleotide with phosphorothioate linkage
  modified_base 2: mod_base = OTHER; note = 2'-fluoro modified nucleotide with phosphorothioate linkage
  modified_base 3: mod_base = OTHER; note = 2'-O-methyl modified nucleotide
  modified_base 4: mod_base = OTHER; note = 2'-O-methyl modified nucleotide
  modified_base 5: mod_base = OTHER; note = 2'-O-methyl modified nucleotide
  modified_base 6: mod_base = OTHER; note = 2'-fluoro modified nucleotide
  modified_base 7: mod_base = OTHER; note = 2'-O-methyl modified nucleotide
  modified_base 8: mod_base = OTHER; note = 2'-O-methyl modified nucleotide
  modified_base 9: mod_base = OTHER; note = 2'-O-methyl modified nucleotide
  modified_base 10: mod_base = OTHER; note = 2'-O-methyl modified nucleotide
  modified_base 11: mod_base = OTHER; note = 2'-O-methyl modified nucleotide
  modified_base 12: mod_base = OTHER; note = 2'-O-methyl modified nucleotide
  modified_base 13: mod_base = OTHER; note = 2'-O-methyl modified nucleotide
  modified_base 14: mod_base = OTHER; note = 2'-fluoro modified nucleotide
  modified_base 15: mod_base = OTHER; note = 2'-O-methyl modified nucleotide
  modified_base 16: mod_base = OTHER; note = 2'-fluoro modified nucleotide
  modified_base 17: mod_base = OTHER; note = 2'-O-methyl modified nucleotide
  modified_base 18: mod_base = OTHER; note = 2'-O-methyl modified nucleotide
  modified_base 19: mod_base = OTHER; note = 2'-O-methyl modified nucleotide with phosphorothioate linkage
  modified_base 20: mod_base = OTHER; note = 2'-O-methyl modified nucleotide with phosphorothioate linkage
  modified_base 21: mod_base = OTHER; note = 2'-O-methyl modified nucleotide
tagagaactgtgacggccaca

SEQ ID NO: 425 - RNA, 21 nt, synthetic construct
  source 1..21: mol_type = other RNA
  modified_base 1: mod_base = OTHER; note = Vinyl-phosphonate 2'-O-methyl modified nucleotide with phosphorothioate linkage
  modified_base 2: mod_base = OTHER; note = 2'-fluoro modified nucleotide with phosphorothioate linkage
  modified_base 3: mod_base = OTHER; note = 2'-O-methyl modified nucleotide
  modified_base 4: mod_base = OTHER; note = 2'-O-methyl modified nucleotide
  modified_base 5: mod_base = OTHER; note = 2'-O-methyl modified nucleotide
  modified_base 6: mod_base = OTHER; note = 2'-fluoro modified nucleotide
  modified_base 7: mod_base = OTHER; note = 2'-O-methyl modified nucleotide
  modified_base 8: mod_base = OTHER; note = 2'-O-methyl modified nucleotide
  modified_base 9: mod_base = OTHER; note = 2'-O-methyl modified nucleotide
  modified_base 10: mod_base = OTHER; note = 2'-O-methyl modified nucleotide
  modified_base 11: mod_base = OTHER; note = 2'-O-methyl modified nucleotide
  modified_base 12: mod_base = OTHER; note = 2'-O-methyl modified nucleotide
  modified_base 13: mod_base = OTHER; note = 2'-O-methyl modified nucleotide
  modified_base 14: mod_base = OTHER; note = 2'-fluoro modified nucleotide
  modified_base 15: mod_base = OTHER; note = 2'-O-methyl modified nucleotide
  modified_base 16: mod_base = OTHER; note = 2'-fluoro modified nucleotide
  modified_base 17: mod_base = OTHER; note = 2'-O-methyl modified nucleotide
  modified_base 18: mod_base = OTHER; note = 2'-O-methyl modified nucleotide
  modified_base 19: mod_base = OTHER; note = 2'-O-methyl modified nucleotide with phosphorothioate linkage
  modified_base 20: mod_base = OTHER; note = 2'-O-methyl modified nucleotide with phosphorothioate linkage
  modified_base 21: mod_base = OTHER; note = 2'-O-methyl modified nucleotide
tagaattgctttgggaccaga

SEQ ID NO: 426 - RNA, 21 nt, synthetic construct
  source 1..21: mol_type = other RNA
  modified_base 1: mod_base = OTHER; note = Vinyl-phosphonate 2'-O-methyl modified nucleotide with phosphorothioate linkage
  modified_base 2: mod_base = OTHER; note = 2'-fluoro modified nucleotide with phosphorothioate linkage
  modified_base 3: mod_base = OTHER; note = 2'-O-methyl modified nucleotide
  modified_base 4: mod_base = OTHER; note = 2'-O-methyl modified nucleotide
  modified_base 5: mod_base = OTHER; note = 2'-O-methyl modified nucleotide
  modified_base 6: mod_base = OTHER; note = 2'-fluoro modified nucleotide
  modified_base 7: mod_base = OTHER; note = 2'-O-methyl modified nucleotide
  modified_base 8: mod_base = OTHER; note = 2'-O-methyl modified nucleotide
  modified_base 9: mod_base = OTHER; note = 2'-O-methyl modified nucleotide
  modified_base 10: mod_base = OTHER; note = 2'-O-methyl modified nucleotide
  modified_base 11: mod_base = OTHER; note = 2'-O-methyl modified nucleotide
  modified_base 12: mod_base = OTHER; note = 2'-O-methyl modified nucleotide
  modified_base 13: mod_base = OTHER; note = 2'-O-methyl modified nucleotide
  modified_base 14: mod_base = OTHER; note = 2'-fluoro modified nucleotide
  modified_base 15: mod_base = OTHER; note = 2'-O-methyl modified nucleotide
  modified_base 16: mod_base = OTHER; note = 2'-fluoro modified nucleotide
  modified_base 17: mod_base = OTHER; note = 2'-O-methyl modified nucleotide
  modified_base 18: mod_base = OTHER; note = 2'-O-methyl modified nucleotide
  modified_base 19: mod_base = OTHER; note = 2'-O-methyl modified nucleotide with phosphorothioate linkage
  modified_base 20: mod_base = OTHER; note = 2'-O-methyl modified nucleotide with phosphorothioate linkage
  modified_base 21: mod_base = OTHER; note = 2'-O-methyl modified nucleotide
ttctgatagatgtactggaaa

SEQ ID NO: 427 - RNA, 21 nt, synthetic construct
  source 1..21: mol_type = other RNA
  modified_base 1: mod_base = OTHER; note = Vinyl-phosphonate 2'-O-methyl modified nucleotide with phosphorothioate linkage
  modified_base 2: mod_base = OTHER; note = 2'-fluoro modified nucleotide with phosphorothioate linkage
  modified_base 3: mod_base = OTHER; note = 2'-O-methyl modified nucleotide
  modified_base 4: mod_base = OTHER; note = 2'-O-methyl modified nucleotide
  modified_base 5: mod_base = OTHER; note = 2'-O-methyl modified nucleotide
  modified_base 6: mod_base = OTHER; note = 2'-fluoro modified nucleotide
  modified_base 7: mod_base = OTHER; note = 2'-O-methyl modified nucleotide
  modified_base 8: mod_base = OTHER; note = 2'-O-methyl modified nucleotide
  modified_base 9: mod_base = OTHER; note = 2'-O-methyl modified nucleotide
  modified_base 10: mod_base = OTHER; note = 2'-O-methyl modified nucleotide
  modified_base 11: mod_base = OTHER; note = 2'-O-methyl modified nucleotide
  modified_base 12: mod_base = OTHER; note = 2'-O-methyl modified nucleotide
  modified_base 13: mod_base = OTHER; note = 2'-O-methyl modified nucleotide
  modified_base 14: mod_base = OTHER; note = 2'-fluoro modified nucleotide
  modified_base 15: mod_base = OTHER; note = 2'-O-methyl modified nucleotide
  modified_base 16: mod_base = OTHER; note = 2'-fluoro modified nucleotide
  modified_base 17: mod_base = OTHER; note = 2'-O-methyl modified nucleotide
  modified_base 18: mod_base = OTHER; note = 2'-O-methyl modified nucleotide
  modified_base 19: mod_base = OTHER; note = 2'-O-methyl modified nucleotide with phosphorothioate linkage
  modified_base 20: mod_base = OTHER; note = 2'-O-methyl modified nucleotide with phosphorothioate linkage
  modified_base 21: mod_base = OTHER; note = 2'-O-methyl modified nucleotide
tttctgatagatgtactggaa

SEQ ID NO: 428 - RNA, 21 nt, synthetic construct
  source 1..21: mol_type = other RNA
  modified_base 1: mod_base = OTHER; note = Vinyl-phosphonate 2'-O-methyl modified nucleotide with phosphorothioate linkage
  modified_base 2: mod_base = OTHER; note = 2'-fluoro modified nucleotide with phosphorothioate linkage
  modified_base 3: mod_base = OTHER; note = 2'-O-methyl modified nucleotide
  modified_base 4: mod_base = OTHER; note = 2'-O-methyl modified nucleotide
  modified_base 5: mod_base = OTHER; note = 2'-O-methyl modified nucleotide
  modified_base 6: mod_base = OTHER; note = 2'-fluoro modified nucleotide
  modified_base 7: mod_base = OTHER; note = 2'-O-methyl modified nucleotide
  modified_base 8: mod_base = OTHER; note = 2'-O-methyl modified nucleotide
  modified_base 9: mod_base = OTHER; note = 2'-O-methyl modified nucleotide
  modified_base 10: mod_base = OTHER; note = 2'-O-methyl modified nucleotide
  modified_base 11: mod_base = OTHER; note = 2'-O-methyl modified nucleotide
  modified_base 12: mod_base = OTHER; note = 2'-O-methyl modified nucleotide
  modified_base 13: mod_base = OTHER; note = 2'-O-methyl modified nucleotide
  modified_base 14: mod_base = OTHER; note = 2'-fluoro modified nucleotide
  modified_base 15: mod_base = OTHER; note = 2'-O-methyl modified nucleotide
  modified_base 16: mod_base = OTHER; note = 2'-fluoro modified nucleotide
  modified_base 17: mod_base = OTHER; note = 2'-O-methyl modified nucleotide
  modified_base 18: mod_base = OTHER; note = 2'-O-methyl modified nucleotide
  modified_base 19: mod_base = OTHER; note = 2'-O-methyl modified nucleotide with phosphorothioate linkage
  modified_base 20: mod_base = OTHER; note = 2'-O-methyl modified nucleotide with phosphorothioate linkage
  modified_base 21: mod_base = OTHER; note = 2'-O-methyl modified nucleotide
tttgatgattctgatagatgt

SEQ ID NO: 429 - RNA, 21 nt, synthetic construct
  source 1..21: mol_type = other RNA
  modified_base 1: mod_base = OTHER; note = Vinyl-phosphonate 2'-O-methyl modified nucleotide with phosphorothioate linkage
  modified_base 2: mod_base = OTHER; note = 2'-fluoro modified nucleotide with phosphorothioate linkage
  modified_base 3: mod_base = OTHER; note = 2'-O-methyl modified nucleotide
  modified_base 4: mod_base = OTHER; note = 2'-O-methyl modified nucleotide
  modified_base 5: mod_base = OTHER; note = 2'-O-methyl modified nucleotide
  modified_base 6: mod_base = OTHER; note = 2'-fluoro modified nucleotide
  modified_base 7: mod_base = OTHER; note = 2'-O-methyl modified nucleotide
  modified_base 8: mod_base = OTHER; note = 2'-O-methyl modified nucleotide
  modified_base 9: mod_base = OTHER; note = 2'-O-methyl modified nucleotide
  modified_base 10: mod_base = OTHER; note = 2'-O-methyl modified nucleotide
  modified_base 11: mod_base = OTHER; note = 2'-O-methyl modified nucleotide
  modified_base 12: mod_base = OTHER; note = 2'-O-methyl modified nucleotide
  modified_base 13: mod_base = OTHER; note = 2'-O-methyl modified nucleotide
  modified_base 14: mod_base = OTHER; note = 2'-fluoro modified nucleotide
  modified_base 15: mod_base = OTHER; note = 2'-O-methyl modified nucleotide
  modified_base 16: mod_base = OTHER; note = 2'-fluoro modified nucleotide
  modified_base 17: mod_base = OTHER; note = 2'-O-methyl modified nucleotide
  modified_base 18: mod_base = OTHER; note = 2'-O-methyl modified nucleotide
  modified_base 19: mod_base = OTHER; note = 2'-O-methyl modified nucleotide with phosphorothioate linkage
  modified_base 20: mod_base = OTHER; note = 2'-O-methyl modified nucleotide with phosphorothioate linkage
  modified_base 21: mod_base = OTHER; note = 2'-O-methyl modified nucleotide
ttcaggaattgagtgacttta

SEQ ID NO: 430 - RNA, 21 nt, synthetic construct
  source 1..21: mol_type = other RNA
  modified_base 1: mod_base = OTHER; note = Vinyl-phosphonate 2'-O-methyl modified nucleotide with phosphorothioate linkage
  modified_base 2: mod_base = OTHER; note = 2'-fluoro modified nucleotide with phosphorothioate linkage
  modified_base 3: mod_base = OTHER; note = 2'-O-methyl modified nucleotide
  modified_base 4: mod_base = OTHER; note = 2'-O-methyl modified nucleotide
  modified_base 5: mod_base = OTHER; note = 2'-O-methyl modified nucleotide
  modified_base 6: mod_base = OTHER; note = 2'-fluoro modified nucleotide
  modified_base 7: mod_base = OTHER; note = 2'-O-methyl modified nucleotide
  modified_base 8: mod_base = OTHER; note = 2'-O-methyl modified nucleotide
  modified_base 9: mod_base = OTHER; note = 2'-O-methyl modified nucleotide
  modified_base 10: mod_base = OTHER; note = 2'-O-methyl modified nucleotide
  modified_base 11: mod_base = OTHER; note = 2'-O-methyl modified nucleotide
  modified_base 12: mod_base = OTHER; note = 2'-O-methyl modified nucleotide
  modified_base 13: mod_base = OTHER; note = 2'-O-methyl modified nucleotide
  modified_base 14: mod_base = OTHER; note = 2'-fluoro modified nucleotide
  modified_base 15: mod_base = OTHER; note = 2'-O-methyl modified nucleotide
  modified_base 16: mod_base = OTHER; note = 2'-fluoro modified nucleotide
  modified_base 17: mod_base = OTHER; note = 2'-O-methyl modified nucleotide
  modified_base 18: mod_base = OTHER; note = 2'-O-methyl modified nucleotide
  modified_base 19: mod_base = OTHER; note = 2'-O-methyl modified nucleotide with phosphorothioate linkage
  modified_base 20: mod_base = OTHER; note = 2'-O-methyl modified nucleotide with phosphorothioate linkage
  modified_base 21: mod_base = OTHER; note = 2'-O-methyl modified nucleotide
ttatattgattagttcaggaa

SEQ ID NO: 431 - RNA, 21 nt, synthetic construct
  source 1..21: mol_type = other RNA
  modified_base 1: mod_base = OTHER; note = Vinyl-phosphonate 2'-O-methyl modified nucleotide with phosphorothioate linkage
  modified_base 2: mod_base = OTHER; note = 2'-fluoro modified nucleotide with phosphorothioate linkage
  modified_base 3: mod_base = OTHER; note = 2'-O-methyl modified nucleotide
  modified_base 4: mod_base = OTHER; note = 2'-O-methyl modified nucleotide
  modified_base 5: mod_base = OTHER; note = 2'-O-methyl modified nucleotide
  modified_base 6: mod_base = OTHER; note = 2'-fluoro modified nucleotide
  modified_base 7: mod_base = OTHER; note = 2'-O-methyl modified nucleotide
  modified_base 8: mod_base = OTHER; note = 2'-O-methyl modified nucleotide
  modified_base 9: mod_base = OTHER; note = 2'-O-methyl modified nucleotide
  modified_base 10: mod_base = OTHER; note = 2'-O-methyl modified nucleotide
  modified_base 11: mod_base = OTHER; note = 2'-O-methyl modified nucleotide
  modified_base 12: mod_base = OTHER; note = 2'-O-methyl modified nucleotide
  modified_base 13: mod_base = OTHER; note = 2'-O-methyl modified nucleotide
  modified_base 14: mod_base = OTHER; note = 2'-fluoro modified nucleotide
  modified_base 15: mod_base = OTHER; note = 2'-O-methyl modified nucleotide
  modified_base 16: mod_base = OTHER; note = 2'-fluoro modified nucleotide
  modified_base 17: mod_base = OTHER; note = 2'-O-methyl modified nucleotide
  modified_base 18: mod_base = OTHER; note = 2'-O-methyl modified nucleotide
  modified_base 19: mod_base = OTHER; note = 2'-O-methyl modified nucleotide with phosphorothioate linkage
  modified_base 20: mod_base = OTHER; note = 2'-O-methyl modified nucleotide with phosphorothioate linkage
  modified_base 21: mod_base = OTHER; note = 2'-O-methyl modified nucleotide
ttatatattgattagttcagg

SEQ ID NO: 432 - RNA, 21 nt, synthetic construct
  source 1..21: mol_type = other RNA
  modified_base 1: mod_base = OTHER; note = Vinyl-phosphonate 2'-O-methyl modified nucleotide with phosphorothioate linkage
  modified_base 2: mod_base = OTHER; note = 2'-fluoro modified nucleotide with phosphorothioate linkage
  modified_base 3: mod_base = OTHER; note = 2'-O-methyl modified nucleotide
  modified_base 4: mod_base = OTHER; note = 2'-O-methyl modified nucleotide
  modified_base 5: mod_base = OTHER; note = 2'-O-methyl modified nucleotide
  modified_base 6: mod_base = OTHER; note = 2'-fluoro modified nucleotide
  modified_base 7: mod_base = OTHER; note = 2'-O-methyl modified nucleotide
  modified_base 8: mod_base = OTHER; note = 2'-O-methyl modified nucleotide
  modified_base 9: mod_base = OTHER; note = 2'-O-methyl modified nucleotide
  modified_base 10: mod_base = OTHER; note = 2'-O-methyl modified nucleotide
  modified_base 11: mod_base = OTHER; note = 2'-O-methyl modified nucleotide
  modified_base 12: mod_base = OTHER; note = 2'-O-methyl modified nucleotide
  modified_base 13: mod_base = OTHER; note = 2'-O-methyl modified nucleotide
  modified_base 14: mod_base = OTHER; note = 2'-fluoro modified nucleotide
  modified_base 15: mod_base = OTHER; note = 2'-O-methyl modified nucleotide
  modified_base 16: mod_base = OTHER; note = 2'-fluoro modified nucleotide
  modified_base 17: mod_base = OTHER; note = 2'-O-methyl modified nucleotide
  modified_base 18: mod_base = OTHER; note = 2'-O-methyl modified nucleotide
  modified_base 19: mod_base = OTHER; note = 2'-O-methyl modified nucleotide with phosphorothioate linkage
  modified_base 20: mod_base = OTHER; note = 2'-O-methyl modified nucleotide with phosphorothioate linkage
  modified_base 21: mod_base = OTHER; note = 2'-O-methyl modified nucleotide
ttgcaaggaatgagaaccagg

SEQ ID NO: 433 - RNA, 21 nt, synthetic construct
  source 1..21: mol_type = other RNA
  modified_base 1: mod_base = OTHER; note = Vinyl-phosphonate 2'-O-methyl modified nucleotide with phosphorothioate linkage
  modified_base 2: mod_base = OTHER; note = 2'-fluoro modified nucleotide with phosphorothioate linkage
  modified_base 3: mod_base = OTHER; note = 2'-O-methyl modified nucleotide
  modified_base 4: mod_base = OTHER; note = 2'-O-methyl modified nucleotide
  modified_base 5: mod_base = OTHER; note = 2'-O-methyl modified nucleotide
  modified_base 6: mod_base = OTHER; note = 2'-fluoro modified nucleotide
  modified_base 7: mod_base = OTHER; note = 2'-O-methyl modified nucleotide
  modified_base 8: mod_base = OTHER; note = 2'-O-methyl modified nucleotide
  modified_base 9: mod_base = OTHER; note = 2'-O-methyl modified nucleotide
  modified_base 10: mod_base = OTHER; note = 2'-O-methyl modified nucleotide
  modified_base 11: mod_base = OTHER; note = 2'-O-methyl modified nucleotide
  modified_base 12: mod_base = OTHER; note = 2'-O-methyl modified nucleotide
  modified_base 13: mod_base = OTHER; note = 2'-O-methyl modified nucleotide
  modified_base 14: mod_base = OTHER; note = 2'-fluoro modified nucleotide
  modified_base 15: mod_base = OTHER; note = 2'-O-methyl modified nucleotide
  modified_base 16: mod_base = OTHER; note = 2'-fluoro modified nucleotide
  modified_base 17: mod_base = OTHER; note = 2'-O-methyl modified nucleotide
  modified_base 18: mod_base = OTHER; note = 2'-O-methyl modified nucleotide
  modified_base 19: mod_base = OTHER; note = 2'-O-methyl modified nucleotide with phosphorothioate linkage
  modified_base 20: mod_base = OTHER; note = 2'-O-methyl modified nucleotide with phosphorothioate linkage
  modified_base 21: mod_base = OTHER; note = 2'-O-methyl modified nucleotide
ttatggtgcaaggaatgagaa

SEQ ID NO: 434 - RNA, 21 nt, synthetic construct
  source 1..21: mol_type = other RNA
  modified_base 1: mod_base = OTHER; note = Vinyl-phosphonate 2'-O-methyl modified nucleotide with phosphorothioate linkage
  modified_base 2: mod_base = OTHER; note = 2'-fluoro modified nucleotide with phosphorothioate linkage
  modified_base 3: mod_base = OTHER; note = 2'-O-methyl modified nucleotide
  modified_base 4: mod_base = OTHER; note = 2'-O-methyl modified nucleotide
  modified_base 5: mod_base = OTHER; note = 2'-O-methyl modified nucleotide
  modified_base 6: mod_base = OTHER; note = 2'-fluoro modified nucleotide
  modified_base 7: mod_base = OTHER; note = 2'-O-methyl modified nucleotide
  modified_base 8: mod_base = OTHER; note = 2'-O-methyl modified nucleotide
  modified_base 9: mod_base = OTHER; note = 2'-O-methyl modified nucleotide
  modified_base 10: mod_base = OTHER; note = 2'-O-methyl modified nucleotide
  modified_base 11: mod_base = OTHER; note = 2'-O-methyl modified nucleotide
  modified_base 12: mod_base = OTHER; note = 2'-O-methyl modified nucleotide
  modified_base 13: mod_base = OTHER; note = 2'-O-methyl modified nucleotide
  modified_base 14: mod_base = OTHER; note = 2'-fluoro modified nucleotide
  modified_base 15: mod_base = OTHER; note = 2'-O-methyl modified nucleotide
  modified_base 16: mod_base = OTHER; note = 2'-fluoro modified nucleotide
  modified_base 17: mod_base = OTHER; note = 2'-O-methyl modified nucleotide
  modified_base 18: mod_base = OTHER; note = 2'-O-methyl modified nucleotide
  modified_base 19: mod_base = OTHER; note = 2'-O-methyl modified nucleotide with phosphorothioate linkage
  modified_base 20: mod_base = OTHER; note = 2'-O-methyl modified nucleotide with phosphorothioate linkage
  modified_base 21: mod_base = OTHER; note = 2'-O-methyl modified nucleotide
taacccagcagaaagccaata

SEQ ID NO: 435 - RNA, 21 nt, synthetic construct
  source 1..21: mol_type = other RNA
  modified_base 1: mod_base = OTHER; note = Vinyl-phosphonate 2'-O-methyl modified nucleotide with phosphorothioate linkage
  modified_base 2: mod_base = OTHER; note = 2'-fluoro modified nucleotide with phosphorothioate linkage
  modified_base 3: mod_base = OTHER; note = 2'-O-methyl modified nucleotide
  modified_base 4: mod_base = OTHER; note = 2'-O-methyl modified nucleotide
  modified_base 5: mod_base = OTHER; note = 2'-O-methyl modified nucleotide
  modified_base 6: mod_base = OTHER; note = 2'-fluoro modified nucleotide
  modified_base 7: mod_base = OTHER; note = 2'-O-methyl modified nucleotide
  modified_base 8: mod_base = OTHER; note = 2'-O-methyl modified nucleotide
  modified_base 9: mod_base = OTHER; note = 2'-O-methyl modified nucleotide
  modified_base 10: mod_base = OTHER; note = 2'-O-methyl modified nucleotide
  modified_base 11: mod_base = OTHER; note = 2'-O-methyl modified nucleotide
  modified_base 12: mod_base = OTHER; note = 2'-O-methyl modified nucleotide
  modified_base 13: mod_base = OTHER; note = 2'-O-methyl modified nucleotide
  modified_base 14: mod_base = OTHER; note = 2'-fluoro modified nucleotide
  modified_base 15: mod_base = OTHER; note = 2'-O-methyl modified nucleotide
  modified_base 16: mod_base = OTHER; note = 2'-fluoro modified nucleotide
  modified_base 17: mod_base = OTHER; note = 2'-O-methyl modified nucleotide
  modified_base 18: mod_base = OTHER; note = 2'-O-methyl modified nucleotide
  modified_base 19: mod_base = OTHER; note = 2'-O-methyl modified nucleotide with phosphorothioate linkage
  modified_base 20: mod_base = OTHER; note = 2'-O-methyl modified nucleotide with phosphorothioate linkage
  modified_base 21: mod_base = OTHER; note = 2'-O-methyl modified nucleotide
tggaaaatcatgtagaggagg

SEQ ID NO: 436 - RNA, 23 nt, synthetic construct
  source 1..23: mol_type = other RNA
  modified_base 1: mod_base = OTHER; note = Vinyl-phosphonate 2'-O-methyl modified nucleotide with phosphorothioate linkage
  modified_base 2: mod_base = OTHER; note = 2'-fluoro modified nucleotide with phosphorothioate linkage
  modified_base 3: mod_base = OTHER; note = 2'-O-methyl modified nucleotide
  modified_base 4: mod_base = OTHER; note = 2'-O-methyl modified nucleotide
  modified_base 5: mod_base = OTHER; note = 2'-O-methyl modified nucleotide
  modified_base 6: mod_base = OTHER; note = 2'-fluoro modified nucleotide
  modified_base 7: mod_base = OTHER; note = 2'-O-methyl modified nucleotide
  modified_base 8: mod_base = OTHER; note = 2'-fluoro modified nucleotide
  modified_base 9: mod_base = OTHER; note = 2'-fluoro modified nucleotide
  modified_base 10: mod_base = OTHER; note = 2'-O-methyl modified nucleotide
  modified_base 11: mod_base = OTHER; note = 2'-O-methyl modified nucleotide
  modified_base 12: mod_base = OTHER; note = 2'-O-methyl modified nucleotide
  modified_base 13: mod_base = OTHER; note = 2'-O-methyl modified nucleotide
  modified_base 14: mod_base = OTHER; note = 2'-fluoro modified nucleotide
  modified_base 15: mod_base = OTHER; note = 2'-O-methyl modified nucleotide
  modified_base 16: mod_base = OTHER; note = 2'-fluoro modified nucleotide
  modified_base 17: mod_base = OTHER; note = 2'-O-methyl modified nucleotide
  modified_base 18: mod_base = OTHER; note = 2'-O-methyl modified nucleotide
  modified_base 19: mod_base = OTHER; note = 2'-O-methyl modified nucleotide
  modified_base 20: mod_base = OTHER; note = 2'-O-methyl modified nucleotide
  modified_base 21: mod_base = OTHER; note = 2'-O-methyl modified nucleotide with phosphorothioate linkage
  modified_base 22: mod_base = OTHER; note = 2'-O-methyl modified nucleotide with phosphorothioate linkage
  modified_base 23: mod_base = OTHER; note = 2'-O-methyl modified nucleotide
tataagtgagccttgatcttgct

SEQ ID NO: 437 - RNA, 23 nt, synthetic construct
  source 1..23: mol_type = other RNA
  modified_base 1: mod_base = OTHER; note = Vinyl-phosphonate 2'-O-methyl modified nucleotide with phosphorothioate linkage
  modified_base 2: mod_base = OTHER; note = 2'-fluoro modified nucleotide with phosphorothioate linkage
  modified_base 3: mod_base = OTHER; note = 2'-O-methyl modified nucleotide
  modified_base 4: mod_base = OTHER; note = 2'-O-methyl modified nucleotide
  modified_base 5: mod_base = OTHER; note = 2'-O-methyl modified nucleotide
  modified_base 6: mod_base = OTHER; note = 2'-fluoro modified nucleotide
  modified_base 7: mod_base = OTHER; note = 2'-O-methyl modified nucleotide
  modified_base 8: mod_base = OTHER; note = 2'-fluoro modified nucleotide
  modified_base 9: mod_base = OTHER; note = 2'-fluoro modified nucleotide
  modified_base 10: mod_base = OTHER; note = 2'-O-methyl modified nucleotide
  modified_base 11: mod_base = OTHER; note = 2'-O-methyl modified nucleotide
  modified_base 12: mod_base = OTHER; note = 2'-O-methyl modified nucleotide
  modified_base 13: mod_base = OTHER; note = 2'-O-methyl modified nucleotide
  modified_base 14: mod_base = OTHER; note = 2'-fluoro modified nucleotide
  modified_base 15: mod_base = OTHER; note = 2'-O-methyl modified nucleotide
  modified_base 16: mod_base = OTHER; note = 2'-fluoro modified nucleotide
  modified_base 17: mod_base = OTHER; note = 2'-O-methyl modified nucleotide
  modified_base 18: mod_base = OTHER; note = 2'-O-methyl modified nucleotide
  modified_base 19: mod_base = OTHER; note = 2'-O-methyl modified nucleotide
  modified_base 20: mod_base = OTHER; note = 2'-O-methyl modified nucleotide
  modified_base 21: mod_base = OTHER; note = 2'-O-methyl modified nucleotide with phosphorothioate linkage
  modified_base 22: mod_base = OTHER; note = 2'-O-methyl modified nucleotide with phosphorothioate linkage
  modified_base 23: mod_base = OTHER; note = 2'-O-methyl modified nucleotide
ttggtcatcacaatgctgaggtt

SEQ ID NO: 438 - RNA, 23 nt, synthetic construct
  source 1..23: mol_type = other RNA
  modified_base 1: mod_base = OTHER; note = Vinyl-phosphonate 2'-O-methyl modified nucleotide with phosphorothioate linkage
  modified_base 2: mod_base = OTHER; note = 2'-fluoro modified nucleotide with phosphorothioate linkage
  modified_base 3: mod_base = OTHER; note = 2'-O-methyl modified nucleotide
  modified_base 4: mod_base = OTHER; note = 2'-O-methyl modified nucleotide
  modified_base 5: mod_base = OTHER; note = 2'-O-methyl modified nucleotide
  modified_base 6: mod_base = OTHER; note = 2'-fluoro modified nucleotide
  modified_base 7: mod_base = OTHER; note = 2'-O-methyl modified nucleotide
  modified_base 8: mod_base = OTHER; note = 2'-fluoro modified nucleotide
  modified_base 9: mod_base = OTHER; note = 2'-fluoro modified nucleotide
  modified_base 10: mod_base = OTHER; note = 2'-O-methyl modified nucleotide
  modified_base 11: mod_base = OTHER; note = 2'-O-methyl modified nucleotide
  modified_base 12: mod_base = OTHER; note = 2'-O-methyl modified nucleotide
  modified_base 13: mod_base = OTHER; note = 2'-O-methyl modified nucleotide
  modified_base 14: mod_base = OTHER; note = 2'-fluoro modified nucleotide
  modified_base 15: mod_base = OTHER; note = 2'-O-methyl modified nucleotide
  modified_base 16: mod_base = OTHER; note = 2'-fluoro modified nucleotide
  modified_base 17: mod_base = OTHER; note = 2'-O-methyl modified nucleotide
  modified_base 18: mod_base = OTHER; note = 2'-O-methyl modified nucleotide
  modified_base 19: mod_base = OTHER; note = 2'-O-methyl modified nucleotide
  modified_base 20: mod_base = OTHER; note = 2'-O-methyl modified nucleotide
  modified_base 21: mod_base = OTHER; note = 2'-O-methyl modified nucleotide with phosphorothioate linkage
  modified_base 22: mod_base = OTHER; note = 2'-O-methyl modified nucleotide with phosphorothioate linkage
  modified_base 23: mod_base = OTHER; note = 2'-O-methyl modified nucleotide
ttgcacaagagaatgatgatcat

SEQ ID NO: 439 - RNA, 23 nt, synthetic construct
  source 1..23: mol_type = other RNA
  modified_base 1: mod_base = OTHER; note = Vinyl-phosphonate 2'-O-methyl modified nucleotide with phosphorothioate linkage
  modified_base 2: mod_base = OTHER; note = 2'-fluoro modified nucleotide with phosphorothioate linkage
  modified_base 3: mod_base = OTHER; note = 2'-O-methyl modified nucleotide
  modified_base 4: mod_base = OTHER; note = 2'-O-methyl modified nucleotide
  modified_base 5: mod_base = OTHER; note = 2'-O-methyl modified nucleotide
  modified_base 6: mod_base = OTHER; note = 2'-fluoro modified nucleotide
  modified_base 7: mod_base = OTHER; note = 2'-O-methyl modified nucleotide
  modified_base 8: mod_base = OTHER; note = 2'-fluoro modified nucleotide
  modified_base 9: mod_base = OTHER; note = 2'-fluoro modified nucleotide
  modified_base 10: mod_base = OTHER; note = 2'-O-methyl modified nucleotide
  modified_base 11: mod_base = OTHER; note = 2'-O-methyl modified nucleotide
  modified_base 12: mod_base = OTHER; note = 2'-O-methyl modified nucleotide
  modified_base 13: mod_base = OTHER; note = 2'-O-methyl modified nucleotide
  modified_base 14: mod_base = OTHER; note = 2'-fluoro modified nucleotide
  modified_base 15: mod_base = OTHER; note = 2'-O-methyl modified nucleotide
  modified_base 16: mod_base = OTHER; note = 2'-fluoro modified nucleotide
  modified_base 17: mod_base = OTHER; note = 2'-O-methyl modified nucleotide
  modified_base 18: mod_base = OTHER; note = 2'-O-methyl modified nucleotide
  modified_base 19: mod_base = OTHER; note = 2'-O-methyl modified nucleotide
  modified_base 20: mod_base = OTHER; note = 2'-O-methyl modified nucleotide
  modified_base 21: mod_base = OTHER; note = 2'-O-methyl modified nucleotide with phosphorothioate linkage
  modified_base 22: mod_base = OTHER; note = 2'-O-methyl modified nucleotide with phosphorothioate linkage
  modified_base 23: mod_base = OTHER; note = 2'-O-methyl modified nucleotide
tagagaactgtgacggccacact

SEQ ID NO: 440 - RNA, 23 nt, synthetic construct
  source 1..23: mol_type = other RNA
  modified_base 1: mod_base = OTHER; note = Vinyl-phosphonate 2'-O-methyl modified nucleotide with phosphorothioate linkage
  modified_base 2: mod_base = OTHER; note = 2'-fluoro modified nucleotide with phosphorothioate linkage
  modified_base 3: mod_base = OTHER; note = 2'-O-methyl modified nucleotide
  modified_base 4: mod_base = OTHER; note = 2'-O-methyl modified nucleotide
  modified_base 5: mod_base = OTHER; note = 2'-O-methyl modified nucleotide
  modified_base 6: mod_base = OTHER; note = 2'-fluoro modified nucleotide
  modified_base 7: mod_base = OTHER; note = 2'-O-methyl modified nucleotide
  modified_base 8: mod_base = OTHER; note = 2'-fluoro modified nucleotide
  modified_base 9: mod_base = OTHER; note = 2'-fluoro modified nucleotide
  modified_base 10: mod_base = OTHER; note = 2'-O-methyl modified nucleotide
  modified_base 11: mod_base = OTHER; note = 2'-O-methyl modified nucleotide
  modified_base 12: mod_base = OTHER; note = 2'-O-methyl modified nucleotide
  modified_base 13: mod_base = OTHER; note = 2'-O-methyl modified nucleotide
  modified_base 14: mod_base = OTHER; note = 2'-fluoro modified nucleotide
  modified_base 15: mod_base = OTHER; note = 2'-O-methyl modified nucleotide
  modified_base 16: mod_base = OTHER; note = 2'-fluoro modified nucleotide
  modified_base 17: mod_base = OTHER; note = 2'-O-methyl modified nucleotide
  modified_base 18: mod_base = OTHER; note = 2'-O-methyl modified nucleotide
  modified_base 19: mod_base = OTHER; note = 2'-O-methyl modified nucleotide
  modified_base 20: mod_base = OTHER; note = 2'-O-methyl modified nucleotide
  modified_base 21: mod_base = OTHER; note = 2'-O-methyl modified nucleotide with phosphorothioate linkage
  modified_base 22: mod_base = OTHER; note = 2'-O-methyl modified nucleotide with phosphorothioate linkage
  modified_base 23: mod_base = OTHER; note = 2'-O-methyl modified nucleotide
tagaattgctttgggaccagaat

SEQ ID NO: 441 - RNA, 23 nt, synthetic construct
  source 1..23: mol_type = other RNA
  modified_base 1: mod_base = OTHER; note = Vinyl-phosphonate 2'-O-methyl modified nucleotide with phosphorothioate linkage
  modified_base 2: mod_base = OTHER; note = 2'-fluoro modified nucleotide with phosphorothioate linkage
  modified_base 3: mod_base = OTHER; note = 2'-O-methyl modified nucleotide
  modified_base 4: mod_base = OTHER; note = 2'-O-methyl modified nucleotide
  modified_base 5: mod_base = OTHER; note = 2'-O-methyl modified nucleotide
  modified_base 6: mod_base = OTHER; note = 2'-fluoro modified nucleotide
  modified_base 7: mod_base = OTHER; note = 2'-O-methyl modified nucleotide
  modified_base 8: mod_base = OTHER; note = 2'-fluoro modified nucleotide
  modified_base 9: mod_base = OTHER; note = 2'-fluoro modified nucleotide
  modified_base 10: mod_base = OTHER; note = 2'-O-methyl modified nucleotide
  modified_base 11: mod_base = OTHER; note = 2'-O-methyl modified nucleotide
  modified_base 12: mod_base = OTHER; note = 2'-O-methyl modified nucleotide
  modified_base 13: mod_base = OTHER; note = 2'-O-methyl modified nucleotide
  modified_base 14: mod_base = OTHER; note = 2'-fluoro modified nucleotide
  modified_base 15: mod_base = OTHER; note = 2'-O-methyl modified nucleotide
  modified_base 16: mod_base = OTHER; note = 2'-fluoro modified nucleotide
  modified_base 17: mod_base = OTHER; note = 2'-O-methyl modified nucleotide
  modified_base 18: mod_base = OTHER; note = 2'-O-methyl modified nucleotide
  modified_base 19: mod_base = OTHER; note = 2'-O-methyl modified nucleotide
  modified_base 20: mod_base = OTHER; note = 2'-O-methyl modified nucleotide
  modified_base 21: mod_base = OTHER; note = 2'-O-methyl modified nucleotide with phosphorothioate linkage
  modified_base 22: mod_base = OTHER; note = 2'-O-methyl modified nucleotide with phosphorothioate linkage
  modified_base 23: mod_base = OTHER; note = 2'-O-methyl modified nucleotide
ttctgatagatgtactggaaatg

SEQ ID NO: 442 - RNA, 23 nt, synthetic construct
  source 1..23: mol_type = other RNA
  modified_base 1: mod_base = OTHER; note = Vinyl-phosphonate 2'-O-methyl modified nucleotide with phosphorothioate linkage
  modified_base 2: mod_base = OTHER; note = 2'-fluoro modified nucleotide with phosphorothioate linkage
  modified_base 3: mod_base = OTHER; note = 2'-O-methyl modified nucleotide
  modified_base 4: mod_base = OTHER; note = 2'-O-methyl modified nucleotide
  modified_base 5: mod_base = OTHER; note = 2'-O-methyl modified nucleotide
  modified_base 6: mod_base = OTHER; note = 2'-fluoro modified nucleotide
  modified_base 7: mod_base = OTHER; note = 2'-O-methyl modified nucleotide
  modified_base 8: mod_base = OTHER; note = 2'-fluoro modified nucleotide
  modified_base 9: mod_base = OTHER; note = 2'-fluoro modified nucleotide
  modified_base 10: mod_base = OTHER; note = 2'-O-methyl modified nucleotide
  modified_base 11: mod_base = OTHER; note = 2'-O-methyl modified nucleotide
  modified_base 12: mod_base = OTHER; note = 2'-O-methyl modified nucleotide
  modified_base 13: mod_base = OTHER; note = 2'-O-methyl modified nucleotide
  modified_base 14: mod_base = OTHER; note = 2'-fluoro modified nucleotide
  modified_base 15: mod_base = OTHER; note = 2'-O-methyl modified nucleotide
  modified_base 16: mod_base = OTHER; note = 2'-fluoro modified nucleotide
  modified_base 17: mod_base = OTHER; note = 2'-O-methyl modified nucleotide
  modified_base 18: mod_base = OTHER; note = 2'-O-methyl modified nucleotide
  modified_base 19: mod_base = OTHER; note = 2'-O-methyl modified nucleotide
  modified_base 20: mod_base = OTHER; note = 2'-O-methyl modified nucleotide
  modified_base 21: mod_base = OTHER; note = 2'-O-methyl modified nucleotide with phosphorothioate linkage
  modified_base 22: mod_base = OTHER; note = 2'-O-methyl modified nucleotide with phosphorothioate linkage
  modified_base 23: mod_base = OTHER; note = 2'-O-methyl modified nucleotide
tttctgatagatgtactggaaat

SEQ ID NO: 443 - RNA, 23 nt, synthetic construct
  source 1..23: mol_type = other RNA
  modified_base 1: mod_base = OTHER; note = Vinyl-phosphonate 2'-O-methyl modified nucleotide with phosphorothioate linkage
  modified_base 2: mod_base = OTHER; note = 2'-fluoro modified nucleotide with phosphorothioate linkage
  modified_base 3: mod_base = OTHER; note = 2'-O-methyl modified nucleotide
  modified_base 4: mod_base = OTHER; note = 2'-O-methyl modified nucleotide
  modified_base 5: mod_base = OTHER; note = 2'-O-methyl modified nucleotide
  modified_base 6: mod_base = OTHER; note = 2'-fluoro modified nucleotide
  modified_base 7: mod_base = OTHER; note = 2'-O-methyl modified nucleotide
  modified_base 8: mod_base = OTHER; note = 2'-fluoro modified nucleotide
  modified_base 9: mod_base = OTHER; note = 2'-fluoro modified nucleotide
  modified_base 10: mod_base = OTHER; note = 2'-O-methyl modified nucleotide
  modified_base 11: mod_base = OTHER; note = 2'-O-methyl modified nucleotide
  modified_base 12: mod_base = OTHER; note = 2'-O-methyl modified nucleotide
  modified_base 13: mod_base = OTHER; note = 2'-O-methyl modified nucleotide
  modified_base 14: mod_base = OTHER; note = 2'-fluoro modified nucleotide
  modified_base 15: mod_base = OTHER; note = 2'-O-methyl modified nucleotide
  modified_base 16: mod_base = OTHER; note = 2'-fluoro modified nucleotide
  modified_base 17: mod_base = OTHER; note = 2'-O-methyl modified nucleotide
  modified_base 18: mod_base = OTHER; note = 2'-O-methyl modified nucleotide
  modified_base 19: mod_base = OTHER; note = 2'-O-methyl modified nucleotide
  modified_base 20: mod_base = OTHER; note = 2'-O-methyl modified nucleotide
  modified_base 21: mod_base = OTHER; note = 2'-O-methyl modified nucleotide with phosphorothioate linkage
  modified_base 22: mod_base = OTHER; note = 2'-O-methyl modified nucleotide with phosphorothioate linkage
  modified_base 23: mod_base = OTHER; note = 2'-O-methyl modified nucleotide
tttgatgattctgatagatgtac

SEQ ID NO: 444 - RNA, 23 nt, synthetic construct
  source 1..23: mol_type = other RNA
  modified_base 1: mod_base = OTHER; note = Vinyl-phosphonate 2'-O-methyl modified nucleotide with phosphorothioate linkage
  modified_base 2: mod_base = OTHER; note = 2'-fluoro modified nucleotide with phosphorothioate linkage
  modified_base 3: mod_base = OTHER; note = 2'-O-methyl modified nucleotide
  modified_base 4: mod_base = OTHER; note = 2'-O-methyl modified nucleotide
  modified_base 5: mod_base = OTHER; note = 2'-O-methyl modified nucleotide
  modified_base 6: mod_base = OTHER; note = 2'-fluoro modified nucleotide
  modified_base 7: mod_base = OTHER; note = 2'-O-methyl modified nucleotide
  modified_base 8: mod_base = OTHER; note = 2'-fluoro modified nucleotide
  modified_base 9: mod_base = OTHER; note = 2'-fluoro modified nucleotide
  modified_base 10: mod_base = OTHER; note = 2'-O-methyl modified nucleotide
  modified_base 11: mod_base = OTHER; note = 2'-O-methyl modified nucleotide
  modified_base 12: mod_base = OTHER; note = 2'-O-methyl modified nucleotide
  modified_base 13: mod_base = OTHER; note = 2'-O-methyl modified nucleotide
  modified_base 14: mod_base = OTHER; note = 2'-fluoro modified nucleotide
  modified_base 15: mod_base = OTHER; note = 2'-O-methyl modified nucleotide
  modified_base 16: mod_base = OTHER; note = 2'-fluoro modified nucleotide
  modified_base 17: mod_base = OTHER; note = 2'-O-methyl modified nucleotide
  modified_base 18: mod_base = OTHER; note = 2'-O-methyl modified nucleotide
  modified_base 19: mod_base = OTHER; note = 2'-O-methyl modified nucleotide
  modified_base 20: mod_base = OTHER; note = 2'-O-methyl modified nucleotide
  modified_base 21: mod_base = OTHER; note = 2'-O-methyl modified nucleotide with phosphorothioate linkage
  modified_base 22: mod_base = OTHER; note = 2'-O-methyl modified nucleotide with phosphorothioate linkage
  modified_base 23: mod_base = OTHER; note = 2'-O-methyl modified nucleotide
ttcaggaattgagtgactttaag

SEQ ID NO: 445 - RNA, 23 nt, synthetic construct
  source 1..23: mol_type = other RNA
  modified_base 1: mod_base = OTHER; note = Vinyl-phosphonate 2'-O-methyl modified nucleotide with phosphorothioate linkage
  modified_base 2: mod_base = OTHER; note = 2'-fluoro modified nucleotide with phosphorothioate linkage
  modified_base 3: mod_base = OTHER; note = 2'-O-methyl modified nucleotide
  modified_base 4: mod_base = OTHER; note = 2'-O-methyl modified nucleotide
  modified_base 5: mod_base = OTHER; note = 2'-O-methyl modified nucleotide
  modified_base 6: mod_base = OTHER; note = 2'-fluoro modified nucleotide
  modified_base 7: mod_base = OTHER; note = 2'-O-methyl modified nucleotide
  modified_base 8: mod_base = OTHER; note = 2'-fluoro modified nucleotide
  modified_base 9: mod_base = OTHER; note = 2'-fluoro modified nucleotide
  modified_base 10: mod_base = OTHER; note = 2'-O-methyl modified nucleotide
  modified_base 11: mod_base = OTHER; note = 2'-O-methyl modified nucleotide
  modified_base 12: mod_base = OTHER; note = 2'-O-methyl modified nucleotide
  modified_base 13: mod_base = OTHER; note = 2'-O-methyl modified nucleotide
  modified_base 14: mod_base = OTHER; note = 2'-fluoro modified nucleotide
  modified_base 15: mod_base = OTHER; note = 2'-O-methyl modified nucleotide
  modified_base 16: mod_base = OTHER; note = 2'-fluoro modified nucleotide
  modified_base 17: mod_base = OTHER; note = 2'-O-methyl modified nucleotide
  modified_base 18: mod_base = OTHER; note = 2'-O-methyl modified nucleotide
  modified_base 19: mod_base = OTHER; note = 2'-O-methyl modified nucleotide
  modified_base 20: mod_base = OTHER; note = 2'-O-methyl modified nucleotide
  modified_base 21: mod_base = OTHER; note = 2'-O-methyl modified nucleotide with phosphorothioate linkage
  modified_base 22: mod_base = OTHER; note = 2'-O-methyl modified nucleotide with phosphorothioate linkage
  modified_base 23: mod_base = OTHER; note = 2'-O-methyl modified nucleotide
ttatattgattagttcaggaatt

SEQ ID NO: 446 - RNA, 23 nt, synthetic construct
  source 1..23: mol_type = other RNA
  modified_base 1: mod_base = OTHER; note = Vinyl-phosphonate 2'-O-methyl modified nucleotide with phosphorothioate linkage
  modified_base 2: mod_base = OTHER; note = 2'-fluoro modified nucleotide with phosphorothioate linkage
  modified_base 3: mod_base = OTHER; note = 2'-O-methyl modified nucleotide
  modified_base 4: mod_base = OTHER; note = 2'-O-methyl modified nucleotide
  modified_base 5: mod_base = OTHER; note = 2'-O-methyl modified nucleotide
  modified_base 6: mod_base = OTHER; note = 2'-fluoro modified nucleotide
  modified_base 7: mod_base = OTHER; note = 2'-O-methyl modified nucleotide
  modified_base 8: mod_base = OTHER; note = 2'-fluoro modified nucleotide
  modified_base 9: mod_base = OTHER; note = 2'-fluoro modified nucleotide
  modified_base 10: mod_base = OTHER; note = 2'-O-methyl modified nucleotide
  modified_base 11: mod_base = OTHER; note = 2'-O-methyl modified nucleotide
  modified_base 12: mod_base = OTHER; note = 2'-O-methyl modified nucleotide
  modified_base 13: mod_base = OTHER; note = 2'-O-methyl modified nucleotide
  modified_base 14: mod_base = OTHER; note = 2'-fluoro modified nucleotide
  modified_base 15: mod_base = OTHER; note = 2'-O-methyl modified nucleotide
  modified_base 16: mod_base = OTHER; note = 2'-fluoro modified nucleotide
  modified_base 17: mod_base = OTHER; note = 2'-O-methyl modified nucleotide
  modified_base 18: mod_base = OTHER; note = 2'-O-methyl modified nucleotide
  modified_base 19: mod_base = OTHER; note = 2'-O-methyl modified nucleotide
  modified_base 20: mod_base = OTHER; note = 2'-O-methyl modified nucleotide
  modified_base 21: mod_base = OTHER; note = 2'-O-methyl modified nucleotide with phosphorothioate linkage
  modified_base 22: mod_base = OTHER; note = 2'-O-methyl modified nucleotide with phosphorothioate linkage
  modified_base 23: mod_base = OTHER; note = 2'-O-methyl modified nucleotide
ttatatattgattagttcaggaa

SEQ ID NO: 447 - RNA, 23 nt, synthetic construct
  source 1..23: mol_type = other RNA
  modified_base 1: mod_base = OTHER; note = Vinyl-phosphonate 2'-O-methyl modified nucleotide with phosphorothioate linkage
  modified_base 2: mod_base = OTHER; note = 2'-fluoro modified nucleotide with phosphorothioate linkage
  modified_base 3: mod_base = OTHER; note = 2'-O-methyl modified nucleotide
  modified_base 4: mod_base = OTHER; note = 2'-O-methyl modified nucleotide
  modified_base 5: mod_base = OTHER; note = 2'-O-methyl modified nucleotide
  modified_base 6: mod_base = OTHER; note = 2'-fluoro modified nucleotide
  modified_base 7: mod_base = OTHER; note = 2'-O-methyl modified nucleotide
  modified_base 8: mod_base = OTHER; note = 2'-fluoro modified nucleotide
  modified_base 9: mod_base = OTHER; note = 2'-fluoro modified nucleotide
  modified_base 10: mod_base = OTHER; note = 2'-O-methyl modified nucleotide
  modified_base 11: mod_base = OTHER; note = 2'-O-methyl modified nucleotide
  modified_base 12: mod_base = OTHER; note = 2'-O-methyl modified nucleotide
  modified_base 13: mod_base = OTHER; note = 2'-O-methyl modified nucleotide
  modified_base 14: mod_base = OTHER; note = 2'-fluoro modified nucleotide
  modified_base 15: mod_base = OTHER; note = 2'-O-methyl modified nucleotide
  modified_base 16: mod_base = OTHER; note = 2'-fluoro modified nucleotide
  modified_base 17: mod_base = OTHER; note = 2'-O-methyl modified nucleotide
  modified_base 18: mod_base = OTHER; note = 2'-O-methyl modified nucleotide
  modified_base 19: mod_base = OTHER; note = 2'-O-methyl modified nucleotide
  modified_base 20: mod_base = OTHER; note = 2'-O-methyl modified nucleotide
  modified_base 21: mod_base = OTHER; note = 2'-O-methyl modified nucleotide with phosphorothioate linkage
  modified_base 22: mod_base = OTHER; note = 2'-O-methyl modified nucleotide with phosphorothioate linkage
  modified_base 23: mod_base = OTHER; note = 2'-O-methyl modified nucleotide
ttgcaaggaatgagaaccaggac

SEQ ID NO: 448 - RNA, 23 nt, synthetic construct
  source 1..23: mol_type = other RNA
  modified_base 1: mod_base = OTHER; note = Vinyl-phosphonate 2'-O-methyl modified nucleotide with phosphorothioate linkage
  modified_base 2: mod_base = OTHER; note = 2'-fluoro modified nucleotide with phosphorothioate linkage
  modified_base 3: mod_base = OTHER; note = 2'-O-methyl modified nucleotide
  modified_base 4: mod_base = OTHER; note = 2'-O-methyl modified nucleotide
  modified_base 5: mod_base = OTHER; note = 2'-O-methyl modified nucleotide
  modified_base 6: mod_base = OTHER; note = 2'-fluoro modified nucleotide
  modified_base 7: mod_base = OTHER; note = 2'-O-methyl modified nucleotide
  modified_base 8: mod_base = OTHER; note = 2'-fluoro modified nucleotide
  modified_base 9: mod_base = OTHER; note = 2'-fluoro modified nucleotide
  modified_base 10: mod_base = OTHER; note = 2'-O-methyl modified nucleotide
  modified_base 11: mod_base = OTHER; note = 2'-O-methyl modified nucleotide
  modified_base 12: mod_base = OTHER; note = 2'-O-methyl modified nucleotide
  modified_base 13: mod_base = OTHER; note = 2'-O-methyl modified nucleotide
  modified_base 14: mod_base = OTHER; note = 2'-fluoro modified nucleotide
  modified_base 15: mod_base = OTHER; note = 2'-O-methyl modified nucleotide
  modified_base 16: mod_base = OTHER; note = 2'-fluoro modified nucleotide
  modified_base 17: mod_base = OTHER; note = 2'-O-methyl modified nucleotide
  modified_base 18: mod_base = OTHER; note = 2'-O-methyl modified nucleotide
  modified_base 19: mod_base = OTHER; note = 2'-O-methyl modified nucleotide
  modified_base 20: mod_base = OTHER; note = 2'-O-methyl modified nucleotide
  modified_base 21: mod_base = OTHER; note = 2'-O-methyl modified nucleotide with phosphorothioate linkage
  modified_base 22: mod_base = OTHER; note = 2'-O-methyl modified nucleotide with phosphorothioate linkage
  modified_base 23: mod_base = OTHER; note = 2'-O-methyl modified nucleotide
ttatggtgcaaggaatgagaacc

SEQ ID NO: 449 - RNA, 23 nt, synthetic construct
  source 1..23: mol_type = other RNA
  modified_base 1: mod_base = OTHER; note = Vinyl-phosphonate 2'-O-methyl modified nucleotide with phosphorothioate linkage
  modified_base 2: mod_base = OTHER; note = 2'-fluoro modified nucleotide with phosphorothioate linkage
  modified_base 3: mod_base = OTHER; note = 2'-O-methyl modified nucleotide
  modified_base 4: mod_base = OTHER; note = 2'-O-methyl modified nucleotide
  modified_base 5: mod_base = OTHER; note = 2'-O-methyl modified nucleotide
  modified_base 6: mod_base = OTHER; note = 2'-fluoro modified nucleotide
  modified_base 7: mod_base = OTHER; note = 2'-O-methyl modified nucleotide
  modified_base 8: mod_base = OTHER; note = 2'-fluoro modified nucleotide
  modified_base 9: mod_base = OTHER; note = 2'-fluoro modified nucleotide
  modified_base 10: mod_base = OTHER; note = 2'-O-methyl modified nucleotide
  modified_base 11: mod_base = OTHER; note = 2'-O-methyl modified nucleotide
  modified_base 12: mod_base = OTHER; note = 2'-O-methyl modified nucleotide
  modified_base 13: mod_base = OTHER; note = 2'-O-methyl modified nucleotide
  modified_base 14: mod_base = OTHER; note = 2'-fluoro modified nucleotide
  modified_base 15: mod_base = OTHER; note = 2'-O-methyl modified nucleotide
  modified_base 16: mod_base = OTHER; note = 2'-fluoro modified nucleotide
  modified_base 17: mod_base = OTHER; note = 2'-O-methyl modified nucleotide
  modified_base 18: mod_base = OTHER; note = 2'-O-methyl modified nucleotide
  modified_base 19: mod_base = OTHER; note = 2'-O-methyl modified nucleotide
  modified_base 20: mod_base = OTHER; note = 2'-O-methyl modified nucleotide
  modified_base 21: mod_base = OTHER; note = 2'-O-methyl modified nucleotide with phosphorothioate linkage
  modified_base 22: mod_base = OTHER; note = 2'-O-methyl modified nucleotide with phosphorothioate linkage
  modified_base 23: mod_base = OTHER; note = 2'-O-methyl modified nucleotide
taacccagcagaaagccaataaa

SEQ ID NO: 450 - RNA, 23 nt, synthetic construct
  source 1..23: mol_type = other RNA
  modified_base 1: mod_base = OTHER; note = Vinyl-phosphonate 2'-O-methyl modified nucleotide with phosphorothioate linkage
  modified_base 2: mod_base = OTHER; note = 2'-fluoro modified nucleotide with phosphorothioate linkage
  modified_base 3: mod_base = OTHER; note = 2'-O-methyl modified nucleotide
  modified_base 4: mod_base = OTHER; note = 2'-O-methyl modified nucleotide
  modified_base 5: mod_base = OTHER; note = 2'-O-methyl modified nucleotide
  modified_base 6: mod_base = OTHER; note = 2'-fluoro modified nucleotide
  modified_base 7: mod_base = OTHER; note = 2'-O-methyl modified nucleotide
  modified_base 8: mod_base = OTHER; note = 2'-fluoro modified nucleotide
  modified_base 9: mod_base = OTHER; note = 2'-fluoro modified nucleotide
  modified_base 10: mod_base = OTHER; note = 2'-O-methyl modified nucleotide
  modified_base 11: mod_base = OTHER; note = 2'-O-methyl modified nucleotide
  modified_base 12: mod_base = OTHER; note = 2'-O-methyl modified nucleotide
  modified_base 13: mod_base = OTHER; note = 2'-O-methyl modified nucleotide
  modified_base 14: mod_base = OTHER; note = 2'-fluoro modified nucleotide
  modified_base 15: mod_base = OTHER; note = 2'-O-methyl modified nucleotide
  modified_base 16: mod_base = OTHER; note = 2'-fluoro modified nucleotide
  modified_base 17: mod_base = OTHER; note = 2'-O-methyl modified nucleotide
  modified_base 18: mod_base = OTHER; note = 2'-O-methyl modified nucleotide
  modified_base 19: mod_base = OTHER; note = 2'-O-methyl modified nucleotide
  modified_base 20: mod_base = OTHER; note = 2'-O-methyl modified nucleotide
  modified_base 21: mod_base = OTHER; note = 2'-O-methyl modified nucleotide with phosphorothioate linkage
  modified_base 22: mod_base = OTHER; note = 2'-O-methyl modified nucleotide with phosphorothioate linkage
  modified_base 23: mod_base = OTHER; note = 2'-O-methyl modified nucleotide
tggaaaatcatgtagaggagggg

SEQ ID NO: 451 - RNA, 23 nt, synthetic construct
  source 1..23: mol_type = other RNA
  modified_base 1: mod_base = OTHER; note = Vinyl-phosphonate 2'-O-methyl modified nucleotide with phosphorothioate linkage
  modified_base 2: mod_base = OTHER; note = 2'-fluoro modified nucleotide with phosphorothioate linkage
  modified_base 3: mod_base = OTHER; note = 2'-O-methyl modified nucleotide
  modified_base 4: mod_base = OTHER; note = 2'-O-methyl modified nucleotide
  modified_base 5: mod_base = OTHER; note = 2'-O-methyl modified nucleotide
  modified_base 6: mod_base = OTHER; note = 2'-fluoro modified nucleotide
  modified_base 7: mod_base = OTHER; note = 2'-O-methyl modified nucleotide
  modified_base 8: mod_base = OTHER; note = 2'-fluoro modified nucleotide
  modified_base 9: mod_base = OTHER; note = 2'-fluoro modified nucleotide
  modified_base 10: mod_base = OTHER; note = 2'-O-methyl modified nucleotide
  modified_base 11: mod_base = OTHER; note = 2'-O-methyl modified nucleotide
  modified_base 12: mod_base = OTHER; note = 2'-O-methyl modified nucleotide
  modified_base 13: mod_base = OTHER; note = 2'-O-methyl modified nucleotide
  modified_base 14: mod_base = OTHER; note = 2'-fluoro modified nucleotide
  modified_base 15: mod_base = OTHER; note = 2'-O-methyl modified nucleotide
  modified_base 16: mod_base = OTHER; note = 2'-fluoro modified nucleotide
  modified_base 17: mod_base = OTHER; note = 2'-O-methyl modified nucleotide
  modified_base 18: mod_base = OTHER; note = 2'-O-methyl modified nucleotide
  modified_base 19: mod_base = OTHER; note = 2'-O-methyl modified nucleotide
  modified_base 20: mod_base = OTHER; note = 2'-O-methyl modified nucleotide
  modified_base 21: mod_base = OTHER; note = 2'-O-methyl modified nucleotide with phosphorothioate linkage
  modified_base 22: mod_base = OTHER; note = 2'-O-methyl modified nucleotide with phosphorothioate linkage
  modified_base 23: mod_base = OTHER; note = 2'-O-methyl modified nucleotide
tataagtgagccttgatcttgct

SEQ ID NO: 452 - RNA, 23 nt, synthetic construct
  source 1..23: mol_type = other RNA
  modified_base 1: mod_base = OTHER; note = Vinyl-phosphonate 2'-O-methyl modified nucleotide with phosphorothioate linkage
  modified_base 2: mod_base = OTHER; note = 2'-fluoro modified nucleotide with phosphorothioate linkage
  modified_base 3: mod_base = OTHER; note = 2'-O-methyl modified nucleotide
  modified_base 4: mod_base = OTHER; note = 2'-O-methyl modified nucleotide
  modified_base 5: mod_base = OTHER; note = 2'-O-methyl modified nucleotide
  modified_base 6: mod_base = OTHER; note = 2'-fluoro modified nucleotide
  modified_base 7: mod_base = OTHER; note = 2'-O-methyl modified nucleotide
  modified_base 8: mod_base = OTHER; note = 2'-fluoro modified nucleotide
  modified_base 9: mod_base = OTHER; note = 2'-fluoro modified nucleotide
  modified_base 10: mod_base = OTHER; note = 2'-O-methyl modified nucleotide
  modified_base 11: mod_base = OTHER; note = 2'-O-methyl modified nucleotide
  modified_base 12: mod_base = OTHER; note = 2'-O-methyl modified nucleotide
  modified_base 13: mod_base = OTHER; note = 2'-O-methyl modified nucleotide
  modified_base 14: mod_base = OTHER; note = 2'-fluoro modified nucleotide
  modified_base 15: mod_base = OTHER; note = 2'-O-methyl modified nucleotide
  modified_base 16: mod_base = OTHER; note = 2'-fluoro modified nucleotide
  modified_base 17: mod_base = OTHER; note = 2'-O-methyl modified nucleotide
  modified_base 18: mod_base = OTHER; note = 2'-O-methyl modified nucleotide
  modified_base 19: mod_base = OTHER; note = 2'-O-methyl modified nucleotide
  modified_base 20: mod_base = OTHER; note = 2'-O-methyl modified nucleotide
  modified_base 21: mod_base = OTHER; note = 2'-O-methyl modified nucleotide with phosphorothioate linkage
  modified_base 22: mod_base = OTHER; note = 2'-O-methyl modified nucleotide with phosphorothioate linkage
  modified_base 23: mod_base = OTHER; note = 2'-O-methyl modified nucleotide
ttggtcatcacaatgctgaggtt

SEQ ID NO: 453 - RNA, 23 nt, synthetic construct
  source 1..23: mol_type = other RNA
  modified_base 1: mod_base = OTHER; note = Vinyl-phosphonate 2'-O-methyl modified nucleotide with phosphorothioate linkage
  modified_base 2: mod_base = OTHER; note = 2'-fluoro modified nucleotide with phosphorothioate linkage
  modified_base 3: mod_base = OTHER; note = 2'-O-methyl modified nucleotide
  modified_base 4: mod_base = OTHER; note = 2'-O-methyl modified nucleotide
  modified_base 5: mod_base = OTHER; note = 2'-O-methyl modified nucleotide
  modified_base 6: mod_base = OTHER; note = 2'-fluoro modified nucleotide
  modified_base 7: mod_base = OTHER; note = 2'-O-methyl modified nucleotide
  modified_base 8: mod_base = OTHER; note = 2'-fluoro modified nucleotide
  modified_base 9: mod_base = OTHER; note = 2'-fluoro modified nucleotide
  modified_base 10: mod_base = OTHER; note = 2'-O-methyl modified nucleotide
  modified_base 11: mod_base = OTHER; note = 2'-O-methyl modified nucleotide
  modified_base 12: mod_base = OTHER; note = 2'-O-methyl modified nucleotide
  modified_base 13: mod_base = OTHER; note = 2'-O-methyl modified nucleotide
  modified_base 14: mod_base = OTHER; note = 2'-fluoro modified nucleotide
  modified_base 15: mod_base = OTHER; note = 2'-O-methyl modified nucleotide
  modified_base 16: mod_base = OTHER; note = 2'-fluoro modified nucleotide
  modified_base 17: mod_base = OTHER; note = 2'-O-methyl modified nucleotide
  modified_base 18: mod_base = OTHER; note = 2'-O-methyl modified nucleotide
  modified_base 19: mod_base = OTHER; note = 2'-O-methyl modified nucleotide
  modified_base 20: mod_base = OTHER; note = 2'-O-methyl modified nucleotide
  modified_base 21: mod_base = OTHER; note = 2'-O-methyl modified nucleotide with phosphorothioate linkage
  modified_base 22: mod_base = OTHER; note = 2'-O-methyl modified nucleotide with phosphorothioate linkage
  modified_base 23: mod_base = OTHER; note = 2'-O-methyl modified nucleotide
ttgcacaagagaatgatgatcat

SEQ ID NO: 454 - RNA, 23 nt, synthetic construct
  source 1..23: mol_type = other RNA
  modified_base 1: mod_base = OTHER; note = Vinyl-phosphonate 2'-O-methyl modified nucleotide with phosphorothioate linkage
  modified_base 2: mod_base = OTHER; note = 2'-fluoro modified nucleotide with phosphorothioate linkage
  modified_base 3: mod_base = OTHER; note = 2'-O-methyl modified nucleotide
  modified_base 4: mod_base = OTHER; note = 2'-O-methyl modified nucleotide
  modified_base 5: mod_base = OTHER; note = 2'-O-methyl modified nucleotide
  modified_base 6: mod_base = OTHER; note = 2'-fluoro modified nucleotide
  modified_base 7: mod_base = OTHER; note = 2'-O-methyl modified nucleotide
  modified_base 8: mod_base = OTHER; note = 2'-fluoro modified nucleotide
  modified_base 9: mod_base = OTHER; note = 2'-fluoro modified nucleotide
  modified_base 10: mod_base = OTHER; note = 2'-O-methyl modified nucleotide
  modified_base 11: mod_base = OTHER; note = 2'-O-methyl modified nucleotide
  modified_base 12: mod_base = OTHER; note = 2'-O-methyl modified nucleotide
  modified_base 13: mod_base = OTHER; note = 2'-O-methyl modified nucleotide
  modified_base 14: mod_base = OTHER; note = 2'-fluoro modified nucleotide
  modified_base 15: mod_base = OTHER; note = 2'-O-methyl modified nucleotide
  modified_base 16: mod_base = OTHER; note = 2'-fluoro modified nucleotide
  modified_base 17: mod_base = OTHER; note = 2'-O-methyl modified nucleotide
  modified_base 18: mod_base = OTHER; note = 2'-O-methyl modified nucleotide
  modified_base 19: mod_base = OTHER; note = 2'-O-methyl modified nucleotide
  modified_base 20: mod_base = OTHER; note = 2'-O-methyl modified nucleotide
  modified_base 21: mod_base = OTHER; note = 2'-O-methyl modified nucleotide with phosphorothioate linkage
  modified_base 22: mod_base = OTHER; note = 2'-O-methyl modified nucleotide with phosphorothioate linkage
  modified_base 23: mod_base = OTHER; note = 2'-O-methyl modified nucleotide
tagagaactgtgacggccacact

SEQ ID NO: 455 - RNA, 23 nt, synthetic construct
  source 1..23: mol_type = other RNA
  modified_base 1: mod_base = OTHER; note = Vinyl-phosphonate 2'-O-methyl modified nucleotide with phosphorothioate linkage
  modified_base 2: mod_base = OTHER; note = 2'-fluoro modified nucleotide with phosphorothioate linkage
  modified_base 3: mod_base = OTHER; note = 2'-O-methyl modified nucleotide
  modified_base 4: mod_base = OTHER; note = 2'-O-methyl modified nucleotide
  modified_base 5: mod_base = OTHER; note = 2'-O-methyl modified nucleotide
  modified_base 6: mod_base = OTHER; note = 2'-fluoro modified nucleotide
  modified_base 7: mod_base = OTHER; note = 2'-O-methyl modified nucleotide
  modified_base 8: mod_base = OTHER; note = 2'-fluoro modified nucleotide
  modified_base 9: mod_base = OTHER; note = 2'-fluoro modified nucleotide
  modified_base 10: mod_base = OTHER; note = 2'-O-methyl modified nucleotide
  modified_base 11: mod_base = OTHER; note = 2'-O-methyl modified nucleotide
  modified_base 12: mod_base = OTHER; note = 2'-O-methyl modified nucleotide
  modified_base 13: mod_base = OTHER; note = 2'-O-methyl modified nucleotide
  modified_base 14: mod_base = OTHER; note = 2'-fluoro modified nucleotide
  modified_base 15: mod_base = OTHER; note = 2'-O-methyl modified nucleotide
  modified_base 16: mod_base = OTHER; note = 2'-fluoro modified nucleotide
  modified_base 17: mod_base = OTHER; note = 2'-O-methyl modified nucleotide
  modified_base 18: mod_base = OTHER; note = 2'-O-methyl modified nucleotide
  modified_base 19: mod_base = OTHER; note = 2'-O-methyl modified nucleotide
  modified_base 20: mod_base = OTHER; note = 2'-O-methyl modified nucleotide
  modified_base 21: mod_base = OTHER; note = 2'-O-methyl modified nucleotide with phosphorothioate linkage
  modified_base 22: mod_base = OTHER; note = 2'-O-methyl modified nucleotide with phosphorothioate linkage
  modified_base 23: mod_base = OTHER; note = 2'-O-methyl modified nucleotide
tagaattgctttgggaccagaat

SEQ ID NO: 456 - RNA, 23 nt, synthetic construct
  source 1..23: mol_type = other RNA
  modified_base 1: mod_base = OTHER; note = Vinyl-phosphonate 2'-O-methyl modified nucleotide with phosphorothioate linkage
  modified_base 2: mod_base = OTHER; note = 2'-fluoro modified nucleotide with phosphorothioate linkage
  modified_base 3: mod_base = OTHER; note = 2'-O-methyl modified nucleotide
  modified_base 4: mod_base = OTHER; note = 2'-O-methyl modified nucleotide
  modified_base 5: mod_base = OTHER; note = 2'-O-methyl modified nucleotide
  modified_base 6: mod_base = OTHER; note = 2'-fluoro modified nucleotide
  modified_base 7: mod_base = OTHER; note = 2'-O-methyl modified nucleotide
  modified_base 8: mod_base = OTHER; note = 2'-fluoro modified nucleotide
  modified_base 9: mod_base = OTHER; note = 2'-fluoro modified nucleotide
  modified_base 10: mod_base = OTHER; note = 2'-O-methyl modified nucleotide
  modified_base 11: mod_base = OTHER; note = 2'-O-methyl modified nucleotide
  modified_base 12: mod_base = OTHER; note = 2'-O-methyl modified nucleotide
  modified_base 13: mod_base = OTHER; note = 2'-O-methyl modified nucleotide
  modified_base 14: mod_base = OTHER; note = 2'-fluoro modified nucleotide
  modified_base 15: mod_base = OTHER; note = 2'-O-methyl modified nucleotide
  modified_base 16: mod_base = OTHER; note = 2'-fluoro modified nucleotide
  modified_base 17: mod_base = OTHER; note = 2'-O-methyl modified nucleotide
  modified_base 18: mod_base = OTHER; note = 2'-O-methyl modified nucleotide
  modified_base 19: mod_base = OTHER; note = 2'-O-methyl modified nucleotide
  modified_base 20: mod_base = OTHER; note = 2'-O-methyl modified nucleotide
  modified_base 21: mod_base = OTHER; note = 2'-O-methyl modified nucleotide with phosphorothioate linkage
  modified_base 22: mod_base = OTHER; note = 2'-O-methyl modified nucleotide with phosphorothioate linkage
  modified_base 23: mod_base = OTHER; note = 2'-O-methyl modified nucleotide
ttctgatagatgtactggaaatg

SEQ ID NO: 457 - RNA, 23 nt, synthetic construct
  source 1..23: mol_type = other RNA
  modified_base 1: mod_base = OTHER; note = Vinyl-phosphonate 2'-O-methyl modified nucleotide with phosphorothioate linkage
  modified_base 2: mod_base = OTHER; note = 2'-fluoro modified nucleotide with phosphorothioate linkage
  modified_base 3: mod_base = OTHER; note = 2'-O-methyl modified nucleotide
  modified_base 4: mod_base = OTHER; note = 2'-O-methyl modified nucleotide
  modified_base 5: mod_base = OTHER; note = 2'-O-methyl modified nucleotide
  modified_base 6: mod_base = OTHER; note = 2'-fluoro modified nucleotide
  modified_base 7: mod_base = OTHER; note = 2'-O-methyl modified nucleotide
  modified_base 8: mod_base = OTHER; note = 2'-fluoro modified nucleotide
  modified_base 9: mod_base = OTHER; note = 2'-fluoro modified nucleotide
  modified_base 10: mod_base = OTHER; note = 2'-O-methyl modified nucleotide
  modified_base 11: mod_base = OTHER; note = 2'-O-methyl modified nucleotide
  modified_base 12: mod_base = OTHER; note = 2'-O-methyl modified nucleotide
  modified_base 13: mod_base = OTHER; note = 2'-O-methyl modified nucleotide
  modified_base 14: mod_base = OTHER; note = 2'-fluoro modified nucleotide
  modified_base 15: mod_base = OTHER; note = 2'-O-methyl modified nucleotide
  modified_base 16: mod_base = OTHER; note = 2'-fluoro modified nucleotide
  modified_base 17: mod_base = OTHER; note = 2'-O-methyl modified nucleotide
  modified_base 18: mod_base = OTHER; note = 2'-O-methyl modified nucleotide
  modified_base 19: mod_base = OTHER; note = 2'-O-methyl modified nucleotide
  modified_base 20: mod_base = OTHER; note = 2'-O-methyl modified nucleotide
  modified_base 21: mod_base = OTHER; note = 2'-O-methyl modified nucleotide with phosphorothioate linkage
  modified_base 22: mod_base = OTHER; note = 2'-O-methyl modified nucleotide with phosphorothioate linkage
  modified_base 23: mod_base = OTHER; note = 2'-O-methyl modified nucleotide
tttctgatagatgtactggaaat

SEQ ID NO: 458 - RNA, 23 nt, synthetic construct
  source 1..23: mol_type = other RNA
  modified_base 1: mod_base = OTHER; note = Vinyl-phosphonate 2'-O-methyl modified nucleotide with phosphorothioate linkage
  modified_base 2: mod_base = OTHER; note = 2'-fluoro modified nucleotide with phosphorothioate linkage
  modified_base 3: mod_base = OTHER; note = 2'-O-methyl modified nucleotide
  modified_base 4: mod_base = OTHER; note = 2'-O-methyl modified nucleotide
  modified_base 5: mod_base = OTHER; note = 2'-O-methyl modified nucleotide
  modified_base 6: mod_base = OTHER; note = 2'-fluoro modified nucleotide
  modified_base 7: mod_base = OTHER; note = 2'-O-methyl modified nucleotide
  modified_base 8: mod_base = OTHER; note = 2'-fluoro modified nucleotide
  modified_base 9: mod_base = OTHER; note = 2'-fluoro modified nucleotide
  modified_base 10: mod_base = OTHER; note = 2'-O-methyl modified nucleotide
  modified_base 11: mod_base = OTHER; note = 2'-O-methyl modified nucleotide
  modified_base 12: mod_base = OTHER; note = 2'-O-methyl modified nucleotide
  modified_base 13: mod_base = OTHER; note = 2'-O-methyl modified nucleotide
  modified_base 14: mod_base = OTHER; note = 2'-fluoro modified nucleotide
  modified_base 15: mod_base = OTHER; note = 2'-O-methyl modified nucleotide
  modified_base 16: mod_base = OTHER; note = 2'-fluoro modified nucleotide
  modified_base 17: mod_base = OTHER; note = 2'-O-methyl modified nucleotide
  modified_base 18: mod_base = OTHER; note = 2'-O-methyl modified nucleotide
  modified_base 19: mod_base = OTHER; note = 2'-O-methyl modified nucleotide
  modified_base 20: mod_base = OTHER; note = 2'-O-methyl modified nucleotide
  modified_base 21: mod_base = OTHER; note = 2'-O-methyl modified nucleotide with phosphorothioate linkage
  modified_base 22: mod_base = OTHER; note = 2'-O-methyl modified nucleotide with phosphorothioate linkage
  modified_base 23: mod_base = OTHER; note = 2'-O-methyl modified nucleotide
tttgatgattctgatagatgtac

SEQ ID NO: 459 - RNA, 23 nt, synthetic construct
  source 1..23: mol_type = other RNA
  modified_base 1: mod_base = OTHER; note = Vinyl-phosphonate 2'-O-methyl modified nucleotide with phosphorothioate linkage
  modified_base 2: mod_base = OTHER; note = 2'-fluoro modified nucleotide with phosphorothioate linkage
  modified_base 3: mod_base = OTHER; note = 2'-O-methyl modified nucleotide
  modified_base 4: mod_base = OTHER; note = 2'-O-methyl modified nucleotide
  modified_base 5: mod_base = OTHER; note = 2'-O-methyl modified nucleotide
  modified_base 6: mod_base = OTHER; note = 2'-fluoro modified nucleotide
  modified_base 7: mod_base = OTHER; note = 2'-O-methyl modified nucleotide
  modified_base 8: mod_base = OTHER; note = 2'-fluoro modified nucleotide
  modified_base 9: mod_base = OTHER; note = 2'-fluoro modified nucleotide
  modified_base 10: mod_base = OTHER; note = 2'-O-methyl modified nucleotide
  modified_base 11: mod_base = OTHER; note = 2'-O-methyl modified nucleotide
  modified_base 12: mod_base = OTHER; note = 2'-O-methyl modified nucleotide
  modified_base 13: mod_base = OTHER; note = 2'-O-methyl modified nucleotide
  modified_base 14: mod_base = OTHER; note = 2'-fluoro modified nucleotide
  modified_base 15: mod_base = OTHER; note = 2'-O-methyl modified nucleotide
  modified_base 16: mod_base = OTHER; note = 2'-fluoro modified nucleotide
  modified_base 17: mod_base = OTHER; note = 2'-O-methyl modified nucleotide
  modified_base 18: mod_base = OTHER; note = 2'-O-methyl modified nucleotide
  modified_base 19: mod_base = OTHER; note = 2'-O-methyl modified nucleotide
  modified_base 20: mod_base = OTHER; note = 2'-O-methyl modified nucleotide
  modified_base 21: mod_base = OTHER; note = 2'-O-methyl modified nucleotide with phosphorothioate linkage
  modified_base 22: mod_base = OTHER; note = 2'-O-methyl modified nucleotide with phosphorothioate linkage
  modified_base 23: mod_base = OTHER; note = 2'-O-methyl modified nucleotide
ttcaggaattgagtgactttaag

SEQ ID NO: 460 - RNA, 23 nt, synthetic construct
  source 1..23: mol_type = other RNA
  modified_base 1: mod_base = OTHER; note = Vinyl-phosphonate 2'-O-methyl modified nucleotide with phosphorothioate linkage
  modified_base 2: mod_base = OTHER; note = 2'-fluoro modified nucleotide with phosphorothioate linkage
  modified_base 3: mod_base = OTHER; note = 2'-O-methyl modified nucleotide
  modified_base 4: mod_base = OTHER; note = 2'-O-methyl modified nucleotide
  modified_base 5: mod_base = OTHER; note = 2'-O-methyl modified nucleotide
  modified_base 6: mod_base = OTHER; note = 2'-fluoro modified nucleotide
  modified_base 7: mod_base = OTHER; note = 2'-O-methyl modified nucleotide
  modified_base 8: mod_base = OTHER; note = 2'-fluoro modified nucleotide
  modified_base 9: mod_base = OTHER; note = 2'-fluoro modified nucleotide
  modified_base 10: mod_base = OTHER; note = 2'-O-methyl modified nucleotide
  modified_base 11: mod_base = OTHER; note = 2'-O-methyl modified nucleotide
  modified_base 12: mod_base = OTHER; note = 2'-O-methyl modified nucleotide
  modified_base 13: mod_base = OTHER; note = 2'-O-methyl modified nucleotide
  modified_base 14: mod_base = OTHER; note = 2'-fluoro modified nucleotide
  modified_base 15: mod_base = OTHER; note = 2'-O-methyl modified nucleotide
  modified_base 16: mod_base = OTHER; note = 2'-fluoro modified nucleotide
  modified_base 17: mod_base = OTHER; note = 2'-O-methyl modified nucleotide
  modified_base 18: mod_base = OTHER; note = 2'-O-methyl modified nucleotide
  modified_base 19: mod_base = OTHER; note = 2'-O-methyl modified nucleotide
  modified_base 20: mod_base = OTHER; note = 2'-O-methyl modified nucleotide
  modified_base 21: mod_base = OTHER; note = 2'-O-methyl modified nucleotide with phosphorothioate linkage
  modified_base 22: mod_base = OTHER; note = 2'-O-methyl modified nucleotide with phosphorothioate linkage
  modified_base 23: mod_base = OTHER; note = 2'-O-methyl modified nucleotide
ttatattgattagttcaggaatt

SEQ ID NO: 461 - RNA, 23 nt, synthetic construct
  source 1..23: mol_type = other RNA
  modified_base 1: mod_base = OTHER; note = Vinyl-phosphonate 2'-O-methyl modified nucleotide with phosphorothioate linkage
  modified_base 2: mod_base = OTHER; note = 2'-fluoro modified nucleotide with phosphorothioate linkage
  modified_base 3: mod_base = OTHER; note = 2'-O-methyl modified nucleotide
  modified_base 4: mod_base = OTHER; note = 2'-O-methyl modified nucleotide
  modified_base 5: mod_base = OTHER; note = 2'-O-methyl modified nucleotide
  modified_base 6: mod_base = OTHER; note = 2'-fluoro modified nucleotide
  modified_base 7: mod_base = OTHER; note = 2'-O-methyl modified nucleotide
  modified_base 8: mod_base = OTHER; note = 2'-fluoro modified nucleotide
  modified_base 9: mod_base = OTHER; note = 2'-fluoro modified nucleotide
  modified_base 10: mod_base = OTHER; note = 2'-O-methyl modified nucleotide
  modified_base 11: mod_base = OTHER; note = 2'-O-methyl modified nucleotide
  modified_base 12: mod_base = OTHER; note = 2'-O-methyl modified nucleotide
  modified_base 13: mod_base = OTHER; note = 2'-O-methyl modified nucleotide
  modified_base 14: mod_base = OTHER; note = 2'-fluoro modified nucleotide
  modified_base 15: mod_base = OTHER; note = 2'-O-methyl modified nucleotide
  modified_base 16: mod_base = OTHER; note = 2'-fluoro modified nucleotide
  modified_base 17: mod_base = OTHER; note = 2'-O-methyl modified nucleotide
  modified_base 18: mod_base = OTHER; note = 2'-O-methyl modified nucleotide
  modified_base 19: mod_base = OTHER; note = 2'-O-methyl modified nucleotide
  modified_base 20: mod_base = OTHER; note = 2'-O-methyl modified nucleotide
  modified_base 21: mod_base = OTHER; note = 2'-O-methyl modified nucleotide with phosphorothioate linkage
  modified_base 22: mod_base = OTHER; note = 2'-O-methyl modified nucleotide with phosphorothioate linkage
  modified_base 23: mod_base = OTHER; note = 2'-O-methyl modified nucleotide
ttatatattgattagttcaggaa

SEQ ID NO: 462 - RNA, 23 nt, synthetic construct
  source 1..23: mol_type = other RNA
  modified_base 1: mod_base = OTHER; note = Vinyl-phosphonate 2'-O-methyl modified nucleotide with phosphorothioate linkage
  modified_base 2: mod_base = OTHER; note = 2'-fluoro modified nucleotide with phosphorothioate linkage
  modified_base 3: mod_base = OTHER; note = 2'-O-methyl modified nucleotide
  modified_base 4: mod_base = OTHER; note = 2'-O-methyl modified nucleotide
  modified_base 5: mod_base = OTHER; note = 2'-O-methyl modified nucleotide
  modified_base 6: mod_base = OTHER; note = 2'-fluoro modified nucleotide
  modified_base 7: mod_base = OTHER; note = 2'-O-methyl modified nucleotide
  modified_base 8: mod_base = OTHER; note = 2'-fluoro modified nucleotide
  modified_base 9: mod_base = OTHER; note = 2'-fluoro modified nucleotide
  modified_base 10: mod_base = OTHER; note = 2'-O-methyl modified nucleotide
  modified_base 11: mod_base = OTHER; note = 2'-O-methyl modified nucleotide
  modified_base 12: mod_base = OTHER; note = 2'-O-methyl modified nucleotide
  modified_base 13: mod_base = OTHER; note = 2'-O-methyl modified nucleotide
  modified_base 14: mod_base = OTHER; note = 2'-fluoro modified nucleotide
  modified_base 15: mod_base = OTHER; note = 2'-O-methyl modified nucleotide
  modified_base 16: mod_base = OTHER; note = 2'-fluoro modified nucleotide
  modified_base 17: mod_base = OTHER; note = 2'-O-methyl modified nucleotide
  modified_base 18: mod_base = OTHER; note = 2'-O-methyl modified nucleotide
  modified_base 19: mod_base = OTHER; note = 2'-O-methyl modified nucleotide
  modified_base 20: mod_base = OTHER; note = 2'-O-methyl modified nucleotide
  modified_base 21: mod_base = OTHER; note = 2'-O-methyl modified nucleotide with phosphorothioate linkage
  modified_base 22: mod_base = OTHER; note = 2'-O-methyl modified nucleotide with phosphorothioate linkage
  modified_base 23: mod_base = OTHER; note = 2'-O-methyl modified nucleotide
ttgcaaggaatgagaaccaggac

SEQ ID NO: 463 - RNA, 23 nt, synthetic construct
  source 1..23: mol_type = other RNA
  modified_base 1: mod_base = OTHER; note = Vinyl-phosphonate 2'-O-methyl modified nucleotide with phosphorothioate linkage
  modified_base 2: mod_base = OTHER; note = 2'-fluoro modified nucleotide with phosphorothioate linkage
  modified_base 3: mod_base = OTHER; note = 2'-O-methyl modified nucleotide
  modified_base 4: mod_base = OTHER; note = 2'-O-methyl modified nucleotide
  modified_base 5: mod_base = OTHER; note = 2'-O-methyl modified nucleotide
  modified_base 6: mod_base = OTHER; note = 2'-fluoro modified nucleotide
  modified_base 7: mod_base = OTHER; note = 2'-O-methyl modified nucleotide
  modified_base 8: mod_base = OTHER; note = 2'-fluoro modified nucleotide
  modified_base 9: mod_base = OTHER; note = 2'-fluoro modified nucleotide
  modified_base 10: mod_base = OTHER; note = 2'-O-methyl modified nucleotide
  modified_base 11: mod_base = OTHER; note = 2'-O-methyl modified nucleotide
  modified_base 12: mod_base = OTHER; note = 2'-O-methyl modified nucleotide
  modified_base 13: mod_base = OTHER; note = 2'-O-methyl modified nucleotide
  modified_base 14: mod_base = OTHER; note = 2'-fluoro modified nucleotide
  modified_base 15: mod_base = OTHER; note = 2'-O-methyl modified nucleotide
  modified_base 16: mod_base = OTHER; note = 2'-fluoro modified nucleotide
  modified_base 17: mod_base = OTHER; note = 2'-O-methyl modified nucleotide
  modified_base 18: mod_base = OTHER; note = 2'-O-methyl modified nucleotide
  modified_base 19: mod_base = OTHER; note = 2'-O-methyl modified nucleotide
  modified_base 20: mod_base = OTHER; note = 2'-O-methyl modified nucleotide
  modified_base 21: mod_base = OTHER; note = 2'-O-methyl modified nucleotide with phosphorothioate linkage
  modified_base 22: mod_base = OTHER; note = 2'-O-methyl modified nucleotide with phosphorothioate linkage
  modified_base 23: mod_base = OTHER; note = 2'-O-methyl modified nucleotide
ttatggtgcaaggaatgagaacc

SEQ ID NO: 464 - RNA, 23 nt, synthetic construct
  source 1..23: mol_type = other RNA
  modified_base 1: mod_base = OTHER; note = Vinyl-phosphonate 2'-O-methyl modified nucleotide with phosphorothioate linkage
  modified_base 2: mod_base = OTHER; note = 2'-fluoro modified nucleotide with phosphorothioate linkage
  modified_base 3: mod_base = OTHER; note = 2'-O-methyl modified nucleotide
  modified_base 4: mod_base = OTHER; note = 2'-O-methyl modified nucleotide
  modified_base 5: mod_base = OTHER; note = 2'-O-methyl modified nucleotide
  modified_base 6: mod_base = OTHER; note = 2'-fluoro modified nucleotide
  modified_base 7: mod_base = OTHER; note = 2'-O-methyl modified nucleotide
  modified_base 8: mod_base = OTHER; note = 2'-fluoro modified nucleotide
  modified_base 9: mod_base = OTHER; note = 2'-fluoro modified nucleotide
  modified_base 10: mod_base = OTHER; note = 2'-O-methyl modified nucleotide
  modified_base 11: mod_base = OTHER; note = 2'-O-methyl modified nucleotide
  modified_base 12: mod_base = OTHER; note = 2'-O-methyl modified nucleotide
  modified_base 13: mod_base = OTHER; note = 2'-O-methyl modified nucleotide
  modified_base 14: mod_base = OTHER; note = 2'-fluoro modified nucleotide
  modified_base 15: mod_base = OTHER; note = 2'-O-methyl modified nucleotide
  modified_base 16: mod_base = OTHER; note = 2'-fluoro modified nucleotide
  modified_base 17: mod_base = OTHER; note = 2'-O-methyl modified nucleotide
  modified_base 18: mod_base = OTHER; note = 2'-O-methyl modified nucleotide
  modified_base 19: mod_base = OTHER; note = 2'-O-methyl modified nucleotide
  modified_base 20: mod_base = OTHER; note = 2'-O-methyl modified nucleotide
  modified_base 21: mod_base = OTHER; note = 2'-O-methyl modified nucleotide with phosphorothioate linkage
  modified_base 22: mod_base = OTHER; note = 2'-O-methyl modified nucleotide with phosphorothioate linkage
  modified_base 23: mod_base = OTHER; note = 2'-O-methyl modified nucleotide
taacccagcagaaagccaataaa

SEQ ID NO: 465 - RNA, 23 nt, synthetic construct
  source 1..23: mol_type = other RNA
  modified_base 1: mod_base = OTHER; note = Vinyl-phosphonate 2'-O-methyl modified nucleotide with phosphorothioate linkage
  modified_base 2: mod_base = OTHER; note = 2'-fluoro modified nucleotide with phosphorothioate linkage
  modified_base 3: mod_base = OTHER; note = 2'-O-methyl modified nucleotide
  modified_base 4: mod_base = OTHER; note = 2'-O-methyl modified nucleotide
  modified_base 5: mod_base = OTHER; note = 2'-O-methyl modified nucleotide
  modified_base 6: mod_base = OTHER; note = 2'-fluoro modified nucleotide
  modified_base 7: mod_base = OTHER; note = 2'-O-methyl modified nucleotide
  modified_base 8: mod_base = OTHER; note = 2'-fluoro modified nucleotide
  modified_base 9: mod_base = OTHER; note = 2'-fluoro modified nucleotide
  modified_base 10: mod_base = OTHER; note = 2'-O-methyl modified nucleotide
  modified_base 11: mod_base = OTHER; note = 2'-O-methyl modified nucleotide
  modified_base 12: mod_base = OTHER; note = 2'-O-methyl modified nucleotide
  modified_base 13: mod_base = OTHER; note = 2'-O-methyl modified nucleotide
  modified_base 14: mod_base = OTHER; note = 2'-fluoro modified nucleotide
  modified_base 15: mod_base = OTHER; note = 2'-O-methyl modified nucleotide
  modified_base 16: mod_base = OTHER; note = 2'-fluoro modified nucleotide
  modified_base 17: mod_base = OTHER; note = 2'-O-methyl modified nucleotide
  modified_base 18: mod_base = OTHER; note = 2'-O-methyl modified nucleotide
  modified_base 19: mod_base = OTHER; note = 2'-O-methyl modified nucleotide
  modified_base 20: mod_base = OTHER; note = 2'-O-methyl modified nucleotide
  modified_base 21: mod_base = OTHER; note = 2'-O-methyl modified nucleotide with phosphorothioate linkage
  modified_base 22: mod_base = OTHER; note = 2'-O-methyl modified nucleotide with phosphorothioate linkage
  modified_base 23: mod_base = OTHER; note = 2'-O-methyl modified nucleotide
tggaaaatcatgtagaggagggg

SEQ ID NO: 466 - RNA, 23 nt, synthetic construct
  source 1..23: mol_type = other RNA
  modified_base 1: mod_base = OTHER; note = Vinyl-phosphonate 2'-O-methyl modified nucleotide with phosphorothioate linkage
  modified_base 2: mod_base = OTHER; note = 2'-fluoro modified nucleotide with phosphorothioate linkage
  modified_base 3: mod_base = OTHER; note = 2'-O-methyl modified nucleotide
  modified_base 4: mod_base = OTHER; note = 2'-O-methyl modified nucleotide
  modified_base 5: mod_base = OTHER; note = 2'-O-methyl modified nucleotide
  modified_base 6: mod_base = OTHER; note = 2'-fluoro modified nucleotide
  modified_base 7: mod_base = OTHER; note = 2'-O-methyl modified nucleotide
  modified_base 8: mod_base = OTHER; note = 2'-O-methyl modified nucleotide
  modified_base 9: mod_base = OTHER; note = 2'-O-methyl modified nucleotide
  modified_base 10: mod_base = OTHER; note = 2'-O-methyl modified nucleotide
  modified_base 11: mod_base = OTHER; note = 2'-O-methyl modified nucleotide
  modified_base 12: mod_base = OTHER; note = 2'-O-methyl modified nucleotide
  modified_base 13: mod_base = OTHER; note = 2'-O-methyl modified nucleotide
  modified_base 14: mod_base = OTHER; note = 2'-fluoro modified nucleotide
  modified_base 15: mod_base = OTHER; note = 2'-O-methyl modified nucleotide
  modified_base 16: mod_base = OTHER; note = 2'-fluoro modified nucleotide
  modified_base 17: mod_base = OTHER; note = 2'-O-methyl modified nucleotide
  modified_base 18: mod_base = OTHER; note = 2'-O-methyl modified nucleotide
  modified_base 19: mod_base = OTHER; note = 2'-O-methyl modified nucleotide
  modified_base 20: mod_base = OTHER; note = 2'-O-methyl modified nucleotide
  modified_base 21: mod_base = OTHER; note = 2'-O-methyl modified nucleotide with phosphorothioate linkage
  modified_base 22: mod_base = OTHER; note = 2'-O-methyl modified nucleotide with phosphorothioate linkage
  modified_base 23: mod_base = OTHER; note = 2'-O-methyl modified nucleotide
tataagtgagccttgatcttgct

SEQ ID NO: 467 - RNA, 23 nt, synthetic construct
  source 1..23: mol_type = other RNA
  modified_base 1: mod_base = OTHER; note = Vinyl-phosphonate 2'-O-methyl modified nucleotide with phosphorothioate linkage
  modified_base 2: mod_base = OTHER; note = 2'-fluoro modified nucleotide with phosphorothioate linkage
  modified_base 3: mod_base = OTHER; note = 2'-O-methyl modified nucleotide
  modified_base 4: mod_base = OTHER; note = 2'-O-methyl modified nucleotide
  modified_base 5: mod_base = OTHER; note = 2'-O-methyl modified nucleotide
  modified_base 6: mod_base = OTHER; note = 2'-fluoro modified nucleotide
  modified_base 7: mod_base = OTHER; note = 2'-O-methyl modified nucleotide
  modified_base 8: mod_base = OTHER; note = 2'-O-methyl modified nucleotide
  modified_base 9: mod_base = OTHER; note = 2'-O-methyl modified nucleotide
  modified_base 10: mod_base = OTHER; note = 2'-O-methyl modified nucleotide
  modified_base 11: mod_base = OTHER; note = 2'-O-methyl modified nucleotide
  modified_base 12: mod_base = OTHER; note = 2'-O-methyl modified nucleotide
  modified_base 13: mod_base = OTHER; note = 2'-O-methyl modified nucleotide
  modified_base 14: mod_base = OTHER; note = 2'-fluoro modified nucleotide
  modified_base 15: mod_base = OTHER; note = 2'-O-methyl modified nucleotide
  modified_base 16: mod_base = OTHER; note = 2'-fluoro modified nucleotide
  modified_base 17: mod_base = OTHER; note = 2'-O-methyl modified nucleotide
  modified_base 18: mod_base = OTHER; note = 2'-O-methyl modified nucleotide
  modified_base 19: mod_base = OTHER; note = 2'-O-methyl modified nucleotide
  modified_base 20: mod_base = OTHER; note = 2'-O-methyl modified nucleotide
  modified_base 21: mod_base = OTHER; note = 2'-O-methyl modified nucleotide with phosphorothioate linkage
  modified_base 22: mod_base = OTHER; note = 2'-O-methyl modified nucleotide with phosphorothioate linkage
  modified_base 23: mod_base = OTHER; note = 2'-O-methyl modified nucleotide
ttggtcatcacaatgctgaggtt

SEQ ID NO: 468 - RNA, 23 nt, synthetic construct
  source 1..23: mol_type = other RNA
  modified_base 1: mod_base = OTHER; note = Vinyl-phosphonate 2'-O-methyl modified nucleotide with phosphorothioate linkage
  modified_base 2: mod_base = OTHER; note = 2'-fluoro modified nucleotide with phosphorothioate linkage
  modified_base 3: mod_base = OTHER; note = 2'-O-methyl modified nucleotide
  modified_base 4: mod_base = OTHER; note = 2'-O-methyl modified nucleotide
  modified_base 5: mod_base = OTHER; note = 2'-O-methyl modified nucleotide
  modified_base 6: mod_base = OTHER; note = 2'-fluoro modified nucleotide
  modified_base 7: mod_base = OTHER; note = 2'-O-methyl modified nucleotide
  modified_base 8: mod_base = OTHER; note = 2'-O-methyl modified nucleotide
  modified_base 9: mod_base = OTHER; note = 2'-O-methyl modified nucleotide
  modified_base 10: mod_base = OTHER; note = 2'-O-methyl modified nucleotide
  modified_base 11: mod_base = OTHER; note = 2'-O-methyl modified nucleotide
  modified_base 12: mod_base = OTHER; note = 2'-O-methyl modified nucleotide
  modified_base 13: mod_base = OTHER; note = 2'-O-methyl modified nucleotide
  modified_base 14: mod_base = OTHER; note = 2'-fluoro modified nucleotide
  modified_base 15: mod_base = OTHER; note = 2'-O-methyl modified nucleotide
  modified_base 16: mod_base = OTHER; note = 2'-fluoro modified nucleotide
  modified_base 17: mod_base = OTHER; note = 2'-O-methyl modified nucleotide
  modified_base 18: mod_base = OTHER; note = 2'-O-methyl modified nucleotide
  modified_base 19: mod_base = OTHER; note = 2'-O-methyl modified nucleotide
  modified_base 20: mod_base = OTHER; note = 2'-O-methyl modified nucleotide
  modified_base 21: mod_base = OTHER; note = 2'-O-methyl modified nucleotide with phosphorothioate linkage
  modified_base 22: mod_base = OTHER; note = 2'-O-methyl modified nucleotide with phosphorothioate linkage
  modified_base 23: mod_base = OTHER; note = 2'-O-methyl modified nucleotide
ttgcacaagagaatgatgatcat

SEQ ID NO: 469 - RNA, 23 nt, synthetic construct
  source 1..23: mol_type = other RNA
  modified_base 1: mod_base = OTHER; note = Vinyl-phosphonate 2'-O-methyl modified nucleotide with phosphorothioate linkage
  modified_base 2: mod_base = OTHER; note = 2'-fluoro modified nucleotide with phosphorothioate linkage
  modified_base 3: mod_base = OTHER; note = 2'-O-methyl modified nucleotide
  modified_base 4: mod_base = OTHER; note = 2'-O-methyl modified nucleotide
  modified_base 5: mod_base = OTHER; note = 2'-O-methyl modified nucleotide
  modified_base 6: mod_base = OTHER; note = 2'-fluoro modified nucleotide
  modified_base 7: mod_base = OTHER; note = 2'-O-methyl modified nucleotide
  modified_base 8: mod_base = OTHER; note = 2'-O-methyl modified nucleotide
  modified_base 9: mod_base = OTHER; note = 2'-O-methyl modified nucleotide
  modified_base 10: mod_base = OTHER; note = 2'-O-methyl modified nucleotide
  modified_base 11: mod_base = OTHER; note = 2'-O-methyl modified nucleotide
  modified_base 12: mod_base = OTHER; note = 2'-O-methyl modified nucleotide
  modified_base 13: mod_base = OTHER; note = 2'-O-methyl modified nucleotide
  modified_base 14: mod_base = OTHER; note = 2'-fluoro modified nucleotide
  modified_base 15: mod_base = OTHER; note = 2'-O-methyl modified nucleotide
  modified_base 16: mod_base = OTHER; note = 2'-fluoro modified nucleotide
  modified_base 17: mod_base = OTHER; note = 2'-O-methyl modified nucleotide
  modified_base 18: mod_base = OTHER; note = 2'-O-methyl modified nucleotide
  modified_base 19: mod_base = OTHER; note = 2'-O-methyl modified nucleotide
  modified_base 20: mod_base = OTHER; note = 2'-O-methyl modified nucleotide
  modified_base 21: mod_base = OTHER; note = 2'-O-methyl modified nucleotide with phosphorothioate linkage
  modified_base 22: mod_base = OTHER; note = 2'-O-methyl modified nucleotide with phosphorothioate linkage
  modified_base 23: mod_base = OTHER; note = 2'-O-methyl modified nucleotide
tagagaactgtgacggccacact

SEQ ID NO: 470 - RNA, 23 nt, synthetic construct
  source 1..23: mol_type = other RNA
  modified_base 1: mod_base = OTHER; note = Vinyl-phosphonate 2'-O-methyl modified nucleotide with phosphorothioate linkage
  modified_base 2: mod_base = OTHER; note = 2'-fluoro modified nucleotide with phosphorothioate linkage
  modified_base 3: mod_base = OTHER; note = 2'-O-methyl modified nucleotide
  modified_base 4: mod_base = OTHER; note = 2'-O-methyl modified nucleotide
  modified_base 5: mod_base = OTHER; note = 2'-O-methyl modified nucleotide
  modified_base 6: mod_base = OTHER; note = 2'-fluoro modified nucleotide
  modified_base 7: mod_base = OTHER; note = 2'-O-methyl modified nucleotide
  modified_base 8: mod_base = OTHER; note = 2'-O-methyl modified nucleotide
  modified_base 9: mod_base = OTHER; note = 2'-O-methyl modified nucleotide
  modified_base 10: mod_base = OTHER; note = 2'-O-methyl modified nucleotide
  modified_base 11: mod_base = OTHER; note = 2'-O-methyl modified nucleotide
  modified_base 12: mod_base = OTHER; note = 2'-O-methyl modified nucleotide
  modified_base 13: mod_base = OTHER; note = 2'-O-methyl modified nucleotide
  modified_base 14: mod_base = OTHER; note = 2'-fluoro modified nucleotide
  modified_base 15: mod_base = OTHER; note = 2'-O-methyl modified nucleotide
  modified_base 16: mod_base = OTHER; note = 2'-fluoro modified nucleotide
  modified_base 17: mod_base = OTHER; note = 2'-O-methyl modified nucleotide
  modified_base 18: mod_base = OTHER; note = 2'-O-methyl modified nucleotide
  modified_base 19: mod_base = OTHER; note = 2'-O-methyl modified nucleotide
  modified_base 20: mod_base = OTHER; note = 2'-O-methyl modified nucleotide
  modified_base 21: mod_base = OTHER; note = 2'-O-methyl modified nucleotide with phosphorothioate linkage
  modified_base 22: mod_base = OTHER; note = 2'-O-methyl modified nucleotide with phosphorothioate linkage
  modified_base 23: mod_base = OTHER; note = 2'-O-methyl modified nucleotide
tagaattgctttgggaccagaat

SEQ ID NO: 471 - RNA, 23 nt, synthetic construct
  source 1..23: mol_type = other RNA
  modified_base 1: mod_base = OTHER; note = Vinyl-phosphonate 2'-O-methyl modified nucleotide with phosphorothioate linkage
  modified_base 2: mod_base = OTHER; note = 2'-fluoro modified nucleotide with phosphorothioate linkage
  modified_base 3: mod_base = OTHER; note = 2'-O-methyl modified nucleotide
  modified_base 4: mod_base = OTHER; note = 2'-O-methyl modified nucleotide
  modified_base 5: mod_base = OTHER; note = 2'-O-methyl modified nucleotide
  modified_base 6: mod_base = OTHER; note = 2'-fluoro modified nucleotide
  modified_base 7: mod_base = OTHER; note = 2'-O-methyl modified nucleotide
  modified_base 8: mod_base = OTHER; note = 2'-O-methyl modified nucleotide
  modified_base 9: mod_base = OTHER; note = 2'-O-methyl modified nucleotide
  modified_base 10: mod_base = OTHER; note = 2'-O-methyl modified nucleotide
  modified_base 11: mod_base = OTHER; note = 2'-O-methyl modified nucleotide
  modified_base 12: mod_base = OTHER; note = 2'-O-methyl modified nucleotide
  modified_base 13: mod_base = OTHER; note = 2'-O-methyl modified nucleotide
  modified_base 14: mod_base = OTHER; note = 2'-fluoro modified nucleotide
  modified_base 15: mod_base = OTHER; note = 2'-O-methyl modified nucleotide
  modified_base 16: mod_base = OTHER; note = 2'-fluoro modified nucleotide
  modified_base 17: mod_base = OTHER; note = 2'-O-methyl modified nucleotide
  modified_base 18: mod_base = OTHER; note = 2'-O-methyl modified nucleotide
  modified_base 19: mod_base = OTHER; note = 2'-O-methyl modified nucleotide
  modified_base 20: mod_base = OTHER; note = 2'-O-methyl modified nucleotide
  modified_base 21: mod_base = OTHER; note = 2'-O-methyl modified nucleotide with phosphorothioate linkage
  modified_base 22: mod_base = OTHER; note = 2'-O-methyl modified nucleotide with phosphorothioate linkage
  modified_base 23: mod_base = OTHER; note = 2'-O-methyl modified nucleotide
ttctgatagatgtactggaaatg

SEQ ID NO: 472 - RNA, 23 nt, synthetic construct
  source 1..23: mol_type = other RNA
  modified_base 1: mod_base = OTHER; note = Vinyl-phosphonate 2'-O-methyl modified nucleotide with phosphorothioate linkage
  modified_base 2: mod_base = OTHER; note = 2'-fluoro modified nucleotide with phosphorothioate linkage
  modified_base 3: mod_base = OTHER; note = 2'-O-methyl modified nucleotide
  modified_base 4: mod_base = OTHER; note = 2'-O-methyl modified nucleotide
  modified_base 5: mod_base = OTHER; note = 2'-O-methyl modified nucleotide
  modified_base 6: mod_base = OTHER; note = 2'-fluoro modified nucleotide
  modified_base 7: mod_base = OTHER; note = 2'-O-methyl modified nucleotide
  modified_base 8: mod_base = OTHER; note = 2'-O-methyl modified nucleotide
  modified_base 9: mod_base = OTHER; note = 2'-O-methyl modified nucleotide
  modified_base 10: mod_base = OTHER; note = 2'-O-methyl modified nucleotide
  modified_base 11: mod_base = OTHER; note = 2'-O-methyl modified nucleotide
  modified_base 12: mod_base = OTHER; note = 2'-O-methyl modified nucleotide
  modified_base 13: mod_base = OTHER; note = 2'-O-methyl modified nucleotide
  modified_base 14: mod_base = OTHER; note = 2'-fluoro modified nucleotide
  modified_base 15: mod_base = OTHER; note = 2'-O-methyl modified nucleotide
  modified_base 16: mod_base = OTHER; note = 2'-fluoro modified nucleotide
  modified_base 17: mod_base = OTHER; note = 2'-O-methyl modified nucleotide
  modified_base 18: mod_base = OTHER; note = 2'-O-methyl modified nucleotide
  modified_base 19: mod_base = OTHER; note = 2'-O-methyl modified nucleotide
  modified_base 20: mod_base = OTHER; note = 2'-O-methyl modified nucleotide
  modified_base 21: mod_base = OTHER; note = 2'-O-methyl modified nucleotide with phosphorothioate linkage
  modified_base 22: mod_base = OTHER; note = 2'-O-methyl modified nucleotide with phosphorothioate linkage
  modified_base 23: mod_base = OTHER; note = 2'-O-methyl modified nucleotide
tttctgatagatgtactggaaat

SEQ ID NO: 473 - RNA, 23 nt, synthetic construct
  source 1..23: mol_type = other RNA
  modified_base 1: mod_base = OTHER; note = Vinyl-phosphonate 2'-O-methyl modified nucleotide with phosphorothioate linkage
  modified_base 2: mod_base = OTHER; note = 2'-fluoro modified nucleotide with phosphorothioate linkage
  modified_base 3: mod_base = OTHER; note = 2'-O-methyl modified nucleotide
  modified_base 4: mod_base = OTHER; note = 2'-O-methyl modified nucleotide
  modified_base 5: mod_base = OTHER; note = 2'-O-methyl modified nucleotide
  modified_base 6: mod_base = OTHER; note = 2'-fluoro modified nucleotide
  modified_base 7: mod_base = OTHER; note = 2'-O-methyl modified nucleotide
  modified_base 8: mod_base = OTHER; note = 2'-O-methyl modified nucleotide
  modified_base 9: mod_base = OTHER; note = 2'-O-methyl modified nucleotide
  modified_base 10: mod_base = OTHER; note = 2'-O-methyl modified nucleotide
  modified_base 11: mod_base = OTHER; note = 2'-O-methyl modified nucleotide
  modified_base 12: mod_base = OTHER; note = 2'-O-methyl modified nucleotide
  modified_base 13: mod_base = OTHER; note = 2'-O-methyl modified nucleotide
  modified_base 14: mod_base = OTHER; note = 2'-fluoro modified nucleotide
  modified_base 15: mod_base = OTHER; note = 2'-O-methyl modified nucleotide
  modified_base 16: mod_base = OTHER; note = 2'-fluoro modified nucleotide
  modified_base 17: mod_base = OTHER; note = 2'-O-methyl modified nucleotide
  modified_base 18: mod_base = OTHER; note = 2'-O-methyl modified nucleotide
  modified_base 19: mod_base = OTHER; note = 2'-O-methyl modified nucleotide
  modified_base 20: mod_base = OTHER; note = 2'-O-methyl modified nucleotide
  modified_base 21: mod_base = OTHER; note = 2'-O-methyl modified nucleotide with phosphorothioate linkage
  modified_base 22: mod_base = OTHER; note = 2'-O-methyl modified nucleotide with phosphorothioate linkage
  modified_base 23: mod_base = OTHER; note = 2'-O-methyl modified nucleotide
tttgatgattctgatagatgtac

SEQ ID NO: 474 - RNA, 23 nt, synthetic construct
  source 1..23: mol_type = other RNA
  modified_base 1: mod_base = OTHER; note = Vinyl-phosphonate 2'-O-methyl modified nucleotide with phosphorothioate linkage
  modified_base 2: mod_base = OTHER; note = 2'-fluoro modified nucleotide with phosphorothioate linkage
  modified_base 3: mod_base = OTHER; note = 2'-O-methyl modified nucleotide
  modified_base 4: mod_base = OTHER; note = 2'-O-methyl modified nucleotide
  modified_base 5: mod_base = OTHER; note = 2'-O-methyl modified nucleotide
  modified_base 6: mod_base = OTHER; note = 2'-fluoro modified nucleotide
  modified_base 7: mod_base = OTHER; note = 2'-O-methyl modified nucleotide
  modified_base 8: mod_base = OTHER; note = 2'-O-methyl modified nucleotide
  modified_base 9: mod_base = OTHER; note = 2'-O-methyl modified nucleotide
  modified_base 10: mod_base = OTHER; note = 2'-O-methyl modified nucleotide
  modified_base 11: mod_base = OTHER; note = 2'-O-methyl modified nucleotide
  modified_base 12: mod_base = OTHER; note = 2'-O-methyl modified nucleotide
  modified_base 13: mod_base = OTHER; note = 2'-O-methyl modified nucleotide
  modified_base 14: mod_base = OTHER; note = 2'-fluoro modified nucleotide
  modified_base 15: mod_base = OTHER; note = 2'-O-methyl modified nucleotide
  modified_base 16: mod_base = OTHER; note = 2'-fluoro modified nucleotide
  modified_base 17: mod_base = OTHER; note = 2'-O-methyl modified nucleotide
  modified_base 18: mod_base = OTHER; note = 2'-O-methyl modified nucleotide
  modified_base 19: mod_base = OTHER; note = 2'-O-methyl modified nucleotide
  modified_base 20: mod_base = OTHER; note = 2'-O-methyl modified nucleotide
  modified_base 21: mod_base = OTHER; note = 2'-O-methyl modified nucleotide with phosphorothioate linkage
  modified_base 22: mod_base = OTHER; note = 2'-O-methyl modified nucleotide with phosphorothioate linkage
  modified_base 23: mod_base = OTHER; note = 2'-O-methyl modified nucleotide
ttcaggaattgagtgactttaag

SEQ ID NO: 475 - RNA, 23 nt, synthetic construct
  source 1..23: mol_type = other RNA
  modified_base 1: mod_base = OTHER; note = Vinyl-phosphonate 2'-O-methyl modified nucleotide with phosphorothioate linkage
  modified_base 2: mod_base = OTHER; note = 2'-fluoro modified nucleotide with phosphorothioate linkage
  modified_base 3: mod_base = OTHER; note = 2'-O-methyl modified nucleotide
  modified_base 4: mod_base = OTHER; note = 2'-O-methyl modified nucleotide
  modified_base 5: mod_base = OTHER; note = 2'-O-methyl modified nucleotide
  modified_base 6: mod_base = OTHER; note = 2'-fluoro modified nucleotide
  modified_base 7: mod_base = OTHER; note = 2'-O-methyl modified nucleotide
  modified_base 8: mod_base = OTHER; note = 2'-O-methyl modified nucleotide
  modified_base 9: mod_base = OTHER; note = 2'-O-methyl modified nucleotide
  modified_base 10: mod_base = OTHER; note = 2'-O-methyl modified nucleotide
  modified_base 11: mod_base = OTHER; note = 2'-O-methyl modified nucleotide
  modified_base 12: mod_base = OTHER; note = 2'-O-methyl modified nucleotide
  modified_base 13: mod_base = OTHER; note = 2'-O-methyl modified nucleotide
  modified_base 14: mod_base = OTHER; note = 2'-fluoro modified nucleotide
  modified_base 15: mod_base = OTHER; note = 2'-O-methyl modified nucleotide
  modified_base 16: mod_base = OTHER; note = 2'-fluoro modified nucleotide
  modified_base 17: mod_base = OTHER; note = 2'-O-methyl modified nucleotide
  modified_base 18: mod_base = OTHER; note = 2'-O-methyl modified nucleotide
  modified_base 19: mod_base = OTHER; note = 2'-O-methyl modified nucleotide
  modified_base 20: mod_base = OTHER; note = 2'-O-methyl modified nucleotide
  modified_base 21: mod_base = OTHER; note = 2'-O-methyl modified nucleotide with phosphorothioate linkage
  modified_base 22: mod_base = OTHER; note = 2'-O-methyl modified nucleotide with phosphorothioate linkage
  modified_base 23: mod_base = OTHER; note = 2'-O-methyl modified nucleotide
ttatattgattagttcaggaatt

SEQ ID NO: 476 - RNA, 23 nt, synthetic construct
  source 1..23: mol_type = other RNA
  modified_base 1: mod_base = OTHER; note = Vinyl-phosphonate 2'-O-methyl modified nucleotide with phosphorothioate linkage
  modified_base 2: mod_base = OTHER; note = 2'-fluoro modified nucleotide with phosphorothioate linkage
  modified_base 3: mod_base = OTHER; note = 2'-O-methyl modified nucleotide
  modified_base 4: mod_base = OTHER; note = 2'-O-methyl modified nucleotide
  modified_base 5: mod_base = OTHER; note = 2'-O-methyl modified nucleotide
  modified_base 6: mod_base = OTHER; note = 2'-fluoro modified nucleotide
  modified_base 7: mod_base = OTHER; note = 2'-O-methyl modified nucleotide
  modified_base 8: mod_base = OTHER; note = 2'-O-methyl modified nucleotide
  modified_base 9: mod_base = OTHER; note = 2'-O-methyl modified nucleotide
  modified_base 10: mod_base = OTHER; note = 2'-O-methyl modified nucleotide
  modified_base 11: mod_base = OTHER; note = 2'-O-methyl modified nucleotide
  modified_base 12: mod_base = OTHER; note = 2'-O-methyl modified nucleotide
  modified_base 13: mod_base = OTHER; note = 2'-O-methyl modified nucleotide
  modified_base 14: mod_base = OTHER; note = 2'-fluoro modified nucleotide
  modified_base 15: mod_base = OTHER; note = 2'-O-methyl modified nucleotide
  modified_base 16: mod_base = OTHER; note = 2'-fluoro modified nucleotide
  modified_base 17: mod_base = OTHER; note = 2'-O-methyl modified nucleotide
  modified_base 18: mod_base = OTHER; note = 2'-O-methyl modified nucleotide
  modified_base 19: mod_base = OTHER; note = 2'-O-methyl modified nucleotide
  modified_base 20: mod_base = OTHER; note = 2'-O-methyl modified nucleotide
  modified_base 21: mod_base = OTHER; note = 2'-O-methyl modified nucleotide with phosphorothioate linkage
  modified_base 22: mod_base = OTHER; note = 2'-O-methyl modified nucleotide with phosphorothioate linkage
  modified_base 23: mod_base = OTHER; note = 2'-O-methyl modified nucleotide
ttatatattgattagttcaggaa

SEQ ID NO: 477 - RNA, 23 nt, synthetic construct
  source 1..23: mol_type = other RNA
  modified_base 1: mod_base = OTHER; note = Vinyl-phosphonate 2'-O-methyl modified nucleotide with phosphorothioate linkage
  modified_base 2: mod_base = OTHER; note = 2'-fluoro modified nucleotide with phosphorothioate linkage
  modified_base 3: mod_base = OTHER; note = 2'-O-methyl modified nucleotide
  modified_base 4: mod_base = OTHER; note = 2'-O-methyl modified nucleotide
  modified_base 5: mod_base = OTHER; note = 2'-O-methyl modified nucleotide
  modified_base 6: mod_base = OTHER; note = 2'-fluoro modified nucleotide
  modified_base 7: mod_base = OTHER; note = 2'-O-methyl modified nucleotide
  modified_base 8: mod_base = OTHER; note = 2'-O-methyl modified nucleotide
  modified_base 9: mod_base = OTHER; note = 2'-O-methyl modified nucleotide
  modified_base 10: mod_base = OTHER; note = 2'-O-methyl modified nucleotide
  modified_base 11: mod_base = OTHER; note = 2'-O-methyl modified nucleotide
  modified_base 12: mod_base = OTHER; note = 2'-O-methyl modified nucleotide
  modified_base 13: mod_base = OTHER; note = 2'-O-methyl modified nucleotide
  modified_base 14: mod_base = OTHER; note = 2'-fluoro modified nucleotide
  modified_base 15: mod_base = OTHER; note = 2'-O-methyl modified nucleotide
  modified_base 16: mod_base = OTHER; note = 2'-fluoro modified nucleotide
  modified_base 17: mod_base = OTHER; note = 2'-O-methyl modified nucleotide
  modified_base 18: mod_base = OTHER; note = 2'-O-methyl modified nucleotide
  modified_base 19: mod_base = OTHER; note = 2'-O-methyl modified nucleotide
  modified_base 20: mod_base = OTHER; note = 2'-O-methyl modified nucleotide
  modified_base 21: mod_base = OTHER; note = 2'-O-methyl modified nucleotide with phosphorothioate linkage
  modified_base 22: mod_base = OTHER; note = 2'-O-methyl modified nucleotide with phosphorothioate linkage
  modified_base 23: mod_base = OTHER; note = 2'-O-methyl modified nucleotide
ttgcaaggaatgagaaccaggac

SEQ ID NO: 478 - RNA, 23 nt, synthetic construct
  source 1..23: mol_type = other RNA
  modified_base 1: mod_base = OTHER; note = Vinyl-phosphonate 2'-O-methyl modified nucleotide with phosphorothioate linkage
  modified_base 2: mod_base = OTHER; note = 2'-fluoro modified nucleotide with phosphorothioate linkage
  modified_base 3: mod_base = OTHER; note = 2'-O-methyl modified nucleotide
  modified_base 4: mod_base = OTHER; note = 2'-O-methyl modified nucleotide
  modified_base 5: mod_base = OTHER; note = 2'-O-methyl modified nucleotide
  modified_base 6: mod_base = OTHER; note = 2'-fluoro modified nucleotide
  modified_base 7: mod_base = OTHER; note = 2'-O-methyl modified nucleotide
  modified_base 8: mod_base = OTHER; note = 2'-O-methyl modified nucleotide
  modified_base 9: mod_base = OTHER; note = 2'-O-methyl modified nucleotide
  modified_base 10: mod_base = OTHER; note = 2'-O-methyl modified nucleotide
  modified_base 11: mod_base = OTHER; note = 2'-O-methyl modified nucleotide
  modified_base 12: mod_base = OTHER; note = 2'-O-methyl modified nucleotide
  modified_base 13: mod_base = OTHER; note = 2'-O-methyl modified nucleotide
  modified_base 14: mod_base = OTHER; note = 2'-fluoro modified nucleotide
  modified_base 15: mod_base = OTHER; note = 2'-O-methyl modified nucleotide
  modified_base 16: mod_base = OTHER; note = 2'-fluoro modified nucleotide
  modified_base 17: mod_base = OTHER; note = 2'-O-methyl modified nucleotide
  modified_base 18: mod_base = OTHER; note = 2'-O-methyl modified nucleotide
  modified_base 19: mod_base = OTHER; note = 2'-O-methyl modified nucleotide
  modified_base 20: mod_base = OTHER; note = 2'-O-methyl modified nucleotide
  modified_base 21: mod_base = OTHER; note = 2'-O-methyl modified nucleotide with phosphorothioate linkage
  modified_base 22: mod_base = OTHER; note = 2'-O-methyl modified nucleotide with phosphorothioate linkage
  modified_base 23: mod_base = OTHER; note = 2'-O-methyl modified nucleotide
ttatggtgcaaggaatgagaacc

SEQ ID NO: 479 - RNA, 23 nt, synthetic construct
  source 1..23: mol_type = other RNA
  modified_base 1: mod_base = OTHER; note = Vinyl-phosphonate 2'-O-methyl modified nucleotide with phosphorothioate linkage
  modified_base 2: mod_base = OTHER; note = 2'-fluoro modified nucleotide with phosphorothioate linkage
  modified_base 3: mod_base = OTHER; note = 2'-O-methyl modified nucleotide
  modified_base 4: mod_base = OTHER; note = 2'-O-methyl modified nucleotide
  modified_base 5: mod_base = OTHER; note = 2'-O-methyl modified nucleotide
  modified_base 6: mod_base = OTHER; note = 2'-fluoro modified nucleotide
  modified_base 7: mod_base = OTHER; note = 2'-O-methyl modified nucleotide
  modified_base 8: mod_base = OTHER; note = 2'-O-methyl modified nucleotide
  modified_base 9: mod_base = OTHER; note = 2'-O-methyl modified nucleotide
  modified_base 10: mod_base = OTHER; note = 2'-O-methyl modified nucleotide
  modified_base 11: mod_base = OTHER; note = 2'-O-methyl modified nucleotide
  modified_base 12: mod_base = OTHER; note = 2'-O-methyl modified nucleotide
  modified_base 13: mod_base = OTHER; note = 2'-O-methyl modified nucleotide
  modified_base 14: mod_base = OTHER; note = 2'-fluoro modified nucleotide
  modified_base 15: mod_base = OTHER; note = 2'-O-methyl modified nucleotide
  modified_base 16: mod_base = OTHER; note = 2'-fluoro modified nucleotide
  modified_base 17: mod_base = OTHER; note = 2'-O-methyl modified nucleotide
  modified_base 18: mod_base = OTHER; note = 2'-O-methyl modified nucleotide
  modified_base 19: mod_base = OTHER; note = 2'-O-methyl modified nucleotide
  modified_base 20: mod_base = OTHER; note = 2'-O-methyl modified nucleotide
  modified_base 21: mod_base = OTHER; note = 2'-O-methyl modified nucleotide with phosphorothioate linkage
  modified_base 22: mod_base = OTHER; note = 2'-O-methyl modified nucleotide with phosphorothioate linkage
  modified_base 23: mod_base = OTHER; note = 2'-O-methyl modified nucleotide
taacccagcagaaagccaataaa

SEQ ID NO: 480 - RNA, 23 nt, synthetic construct
  source 1..23: mol_type = other RNA
  modified_base 1: mod_base = OTHER; note = Vinyl-phosphonate 2'-O-methyl modified nucleotide with phosphorothioate linkage
  modified_base 2: mod_base = OTHER; note = 2'-fluoro modified nucleotide with phosphorothioate linkage
  modified_base 3: mod_base = OTHER; note = 2'-O-methyl modified nucleotide
  modified_base 4: mod_base = OTHER; note = 2'-O-methyl modified nucleotide
  modified_base 5: mod_base = OTHER; note = 2'-O-methyl modified nucleotide
  modified_base 6: mod_base = OTHER; note = 2'-fluoro modified nucleotide
  modified_base 7: mod_base = OTHER; note = 2'-O-methyl modified nucleotide
  modified_base 8: mod_base = OTHER; note = 2'-O-methyl modified nucleotide
  modified_base 9: mod_base = OTHER; note = 2'-O-methyl modified nucleotide
  modified_base 10: mod_base = OTHER; note = 2'-O-methyl modified nucleotide
  modified_base 11: mod_base = OTHER; note = 2'-O-methyl modified nucleotide
  modified_base 12: mod_base = OTHER; note = 2'-O-methyl modified nucleotide
  modified_base 13: mod_base = OTHER; note = 2'-O-methyl modified nucleotide
  modified_base 14: mod_base = OTHER; note = 2'-fluoro modified nucleotide
  modified_base 15: mod_base = OTHER; note = 2'-O-methyl modified nucleotide
  modified_base 16: mod_base = OTHER; note = 2'-fluoro modified nucleotide
  modified_base 17: mod_base = OTHER; note = 2'-O-methyl modified nucleotide
  modified_base 18: mod_base = OTHER; note = 2'-O-methyl modified nucleotide
  modified_base 19: mod_base = OTHER; note = 2'-O-methyl modified nucleotide
  modified_base 20: mod_base = OTHER; note = 2'-O-methyl modified nucleotide
  modified_base 21: mod_base = OTHER; note = 2'-O-methyl modified nucleotide with phosphorothioate linkage
  modified_base 22: mod_base = OTHER; note = 2'-O-methyl modified nucleotide with phosphorothioate linkage
  modified_base 23: mod_base = OTHER; note = 2'-O-methyl modified nucleotide
tggaaaatcatgtagaggagggg

SEQ ID NO: 481 - RNA, 19 nt, synthetic construct
  source 1..19: mol_type = other RNA
tgcgctatgtcatcaaggg

SEQ ID NO: 482 - RNA, 19 nt, synthetic construct
  source 1..19: mol_type = other RNA
tgtccaatgtcttcagtct

SEQ ID NO: 483 - RNA, 19 nt, synthetic construct
  source 1..19: mol_type = other RNA
gatcaaggctcacttatgg

SEQ ID NO: 484 - RNA, 19 nt, synthetic construct
  source 1..19: mol_type = other RNA
atgtcttcagtctggccat

SEQ ID NO: 485 - RNA, 19 nt, synthetic construct
  source 1..19: mol_type = other RNA
cttgcaccatagggatcgt

SEQ ID NO: 486 - RNA, 19 nt, synthetic construct
  source 1..19: mol_type = other RNA
agtcattggaccacttttc

SEQ ID NO: 487 - RNA, 19 nt, synthetic construct
  source 1..19: mol_type = other RNA
ctgaagtcattggaccact

SEQ ID NO: 488 - RNA, 19 nt, synthetic construct
  source 1..19: mol_type = other RNA
agcatttccagtacatcta

SEQ ID NO: 489 - RNA, 19 nt, synthetic construct
  source 1..19: mol_type = other RNA
aagggagggatgatcatca

SEQ ID NO: 490 - RNA, 19 nt, synthetic construct
  source 1..19: mol_type = other RNA
aattcctgaactaatcaat

SEQ ID NO: 491 - RNA, 19 nt, synthetic construct
  source 1..19: mol_type = other RNA
gaacctcagcattgtgatg

SEQ ID NO: 492 - RNA, 19 nt, synthetic construct
  source 1..19: mol_type = other RNA
actcaattcctgaactaat

SEQ ID NO: 493 - RNA, 19 nt, synthetic construct
  source 1..19: mol_type = other RNA
tcatgtttgccatgacacc

SEQ ID NO: 494 - RNA, 19 nt, synthetic construct
  source 1..19: mol_type = other RNA
tagggatcgtcctcaaatc

SEQ ID NO: 495 - RNA, 19 nt, synthetic construct
  source 1..19: mol_type = other RNA
ggagggatgatcatcattc

SEQ ID NO: 496 - RNA, 19 nt, synthetic construct
  source 1..19: mol_type = other RNA
catgcgctatgtcatcaag

SEQ ID NO: 497 - RNA, 19 nt, synthetic construct
  source 1..19: mol_type = other RNA
cactcaattcctgaactaa

SEQ ID NO: 498 - RNA, 19 nt, synthetic construct
  source 1..19: mol_type = other RNA
tggtggcacagtatggcat

SEQ ID NO: 499 - RNA, 19 nt, synthetic construct
  source 1..19: mol_type = other RNA
tgatgccttttattggctt

SEQ ID NO: 500 - RNA, 19 nt, synthetic construct
  source 1..19: mol_type = other RNA
cccctcctctacatgattt

SEQ ID NO: 501 - RNA, 19 nt, synthetic construct
  source 1..19: mol_type = other RNA
agtggtcttccactgcctc

SEQ ID NO: 502 - RNA, 19 nt, synthetic construct
  source 1..19: mol_type = other RNA
caagcgccccacagacctg

SEQ ID NO: 503 - RNA, 19 nt, synthetic construct
  source 1..19: mol_type = other RNA
ttctcattccttgcaccat

SEQ ID NO: 504 - RNA, 19 nt, synthetic construct
  source 1..19: mol_type = other RNA
atttccagtacatctatca

SEQ ID NO: 505 - RNA, 19 nt, synthetic construct
  source 1..19: mol_type = other RNA
catgtttgccatgacacca

SEQ ID NO: 506 - RNA, 19 nt, synthetic construct
  source 1..19: mol_type = other RNA
aaatcccattccaagtttt

SEQ ID NO: 507 - RNA, 19 nt, synthetic construct
  source 1..19: mol_type = other RNA
catgaacctcagcattgtg

SEQ ID NO: 508 - RNA, 19 nt, synthetic construct
  source 1..19: mol_type = other RNA
ccacaatacatgcgctatg

SEQ ID NO: 509 - RNA, 19 nt, synthetic construct
  source 1..19: mol_type = other RNA
tcactcaattcctgaacta

SEQ ID NO: 510 - RNA, 19 nt, synthetic construct
  source 1..19: mol_type = other RNA
ggtggcacagtatggcatc

SEQ ID NO: 511 - RNA, 19 nt, synthetic construct
  source 1..19: mol_type = other RNA
tggctttctgctgggttat

SEQ ID NO: 512 - RNA, 19 nt, synthetic construct
  source 1..19: mol_type = other RNA
aaatacccaaatcccattc

SEQ ID NO: 513 - RNA, 19 nt, synthetic construct
  source 1..19: mol_type = other RNA
cttcatcatgctctcgctg

SEQ ID NO: 514 - RNA, 19 nt, synthetic construct
  source 1..19: mol_type = other RNA
atatatatgtttaacccat

SEQ ID NO: 515 - RNA, 19 nt, synthetic construct
  source 1..19: mol_type = other RNA
actgcctcacaggaggatg

SEQ ID NO: 516 - RNA, 19 nt, synthetic construct
  source 1..19: mol_type = other RNA
tcaaatccaaacggccaca

SEQ ID NO: 517 - RNA, 19 nt, synthetic construct
  source 1..19: mol_type = other RNA
tctacatgattttccagct

SEQ ID NO: 518 - RNA, 19 nt, synthetic construct
  source 1..19: mol_type = other RNA
agactcccaaggataaaac

SEQ ID NO: 519 - RNA, 19 nt, synthetic construct
  source 1..19: mol_type = other RNA
cacccaactttggcaagcg

SEQ ID NO: 520 - RNA, 19 nt, synthetic construct
  source 1..19: mol_type = other RNA
tcctcaaatccaaacggcc

SEQ ID NO: 521 - RNA, 19 nt, synthetic construct
  source 1..19: mol_type = other RNA
cttgtgcagtgtggccgtc

SEQ ID NO: 522 - RNA, 19 nt, synthetic construct
  source 1..19: mol_type = other RNA
agaactgcacaagaaacgg

SEQ ID NO: 523 - RNA, 19 nt, synthetic construct
  source 1..19: mol_type = other RNA
tgcacaagaaacggagtca

SEQ ID NO: 524 - RNA, 19 nt, synthetic construct
  source 1..19: mol_type = other RNA
acctgaagtcattggacca

SEQ ID NO: 525 - RNA, 19 nt, synthetic construct
  source 1..19: mol_type = other RNA
gccacccaactttggcaag

SEQ ID NO: 526 - RNA, 19 nt, synthetic construct
  source 1..19: mol_type = other RNA
gcaccatagggatcgtcct

SEQ ID NO: 527 - RNA, 19 nt, synthetic construct
  source 1..19: mol_type = other RNA
cagtgtggccgtcacagtt

SEQ ID NO: 528 - RNA, 19 nt, synthetic construct
  source 1..19: mol_type = other RNA
caaacggccacaatacatg

SEQ ID NO: 529 - RNA, 19 nt, synthetic construct
  source 1..19: mol_type = other RNA
tgctgggttatgttctctc

SEQ ID NO: 530 - RNA, 19 nt, synthetic construct
  source 1..19: mol_type = other RNA
ctcacttatggaagcctaa

SEQ ID NO: 531 - RNA, 19 nt, synthetic construct
  source 1..19: mol_type = other RNA
ggccgtcacagttctctct

SEQ ID NO: 532 - RNA, 19 nt, synthetic construct
  source 1..19: mol_type = other RNA
tgcagtgtggccgtcacag

SEQ ID NO: 533 - RNA, 19 nt, synthetic construct
  source 1..19: mol_type = other RNA
tcatgctctcgctgggctg

SEQ ID NO: 534 - RNA, 19 nt, synthetic construct
  source 1..19: mol_type = other RNA
atagggatcgtcctcaaat

SEQ ID NO: 535 - RNA, 19 nt, synthetic construct
  source 1..19: mol_type = other RNA
ttccaagttttgtgaccca

SEQ ID NO: 536 - RNA, 19 nt, synthetic construct
  source 1..19: mol_type = other RNA
cagcattgtgatgaccacc

SEQ ID NO: 537 - RNA, 19 nt, synthetic construct
  source 1..19: mol_type = other RNA
gcagtgtggccgtcacagt

SEQ ID NO: 538 - RNA, 19 nt, synthetic construct
  source 1..19: mol_type = other RNA
catgattttccagcttgga

SEQ ID NO: 539 - RNA, 19 nt, synthetic construct
  source 1..19: mol_type = other RNA
gctcacttatggaagccta

SEQ ID NO: 540 - RNA, 19 nt, synthetic construct
  source 1..19: mol_type = other RNA
atccaaacggccacaatac

SEQ ID NO: 541 - RNA, 19 nt, synthetic construct
  source 1..19: mol_type = other RNA
atcaagggagggatgatca

SEQ ID NO: 542 - RNA, 19 nt, synthetic construct
  source 1..19: mol_type = other RNA
cggccacaatacatgcgct

SEQ ID NO: 543 - RNA, 19 nt, synthetic construct
  source 1..19: mol_type = other RNA
ggatggaggcccacaacgc

SEQ ID NO: 544 - RNA, 19 nt, synthetic construct
  source 1..19: mol_type = other RNA
cgccctggtggcacagtat

SEQ ID NO: 545 - RNA, 19 nt, synthetic construct
  source 1..19: mol_type = other RNA
gcaagcgccccacagacct

SEQ ID NO: 546 - RNA, 19 nt, synthetic construct
  source 1..19: mol_type = other RNA
tggccgggaacacagacag

SEQ ID NO: 547 - RNA, 19 nt, synthetic construct
  source 1..19: mol_type = other RNA
agggagggatgatcatcat

SEQ ID NO: 548 - RNA, 19 nt, synthetic construct
  source 1..19: mol_type = other RNA
ccaactttggcaagcgccc

SEQ ID NO: 549 - RNA, 19 nt, synthetic construct
  source 1..19: mol_type = other RNA
acagtatggcatcatgccc

SEQ ID NO: 550 - RNA, 19 nt, synthetic construct
  source 1..19: mol_type = other RNA
ctgtccaatgtcttcagtc

SEQ ID NO: 551 - RNA, 19 nt, synthetic construct
  source 1..19: mol_type = other RNA
caccatagggatcgtcctc

SEQ ID NO: 552 - RNA, 19 nt, synthetic construct
  source 1..19: mol_type = other RNA
accatagggatcgtcctca

SEQ ID NO: 553 - RNA, 19 nt, synthetic construct
  source 1..19: mol_type = other RNA
cgtcctcaaatccaaacgg

SEQ ID NO: 554 - RNA, 19 nt, synthetic construct
  source 1..19: mol_type = other RNA
aggatggaggcccacaacg

SEQ ID NO: 555 - RNA, 19 nt, synthetic construct
  source 1..19: mol_type = other RNA
atgcgctatgtcatcaagg

SEQ ID NO: 556 - RNA, 19 nt, synthetic construct
  source 1..19: mol_type = other RNA
aatacccaaatcccattcc

SEQ ID NO: 557 - RNA, 19 nt, synthetic construct
  source 1..19: mol_type = other RNA
catagggatcgtcctcaaa

SEQ ID NO: 558 - RNA, 19 nt, synthetic construct
  source 1..19: mol_type = other RNA
gcgctatgtcatcaaggga

SEQ ID NO: 559 - RNA, 19 nt, synthetic construct
  source 1..19: mol_type = other RNA
gtatggcatcatgcccctc

SEQ ID NO: 560 - RNA, 19 nt, synthetic construct
  source 1..19: mol_type = other RNA
attccttgcaccataggga

SEQ ID NO: 561 - RNA, 19 nt, synthetic construct
  source 1..19: mol_type = other RNA
ggacaaggtgccctataaa

SEQ ID NO: 562 - RNA, 19 nt, synthetic construct
  source 1..19: mol_type = other RNA
tgcaccatagggatcgtcc

SEQ ID NO: 563 - RNA, 19 nt, synthetic construct
  source 1..19: mol_type = other RNA
agtgtggccgtcacagttc

SEQ ID NO: 564 - RNA, 19 nt, synthetic construct
  source 1..19: mol_type = other RNA
tcacttatggaagcctaaa

SEQ ID NO: 565 - RNA, 19 nt, synthetic construct
  source 1..19: mol_type = other RNA
gccctggtggcacagtatg

SEQ ID NO: 566 - RNA, 19 nt, synthetic construct
  source 1..19: mol_type = other RNA
cagtatggcatcatgcccc

SEQ ID NO: 567 - RNA, 19 nt, synthetic construct
  source 1..19: mol_type = other RNA
ttctgctgggttatgttct

SEQ ID NO: 568 - RNA, 19 nt, synthetic construct
  source 1..19: mol_type = other RNA
ctgcacaagaaacggagtc

SEQ ID NO: 569 - RNA, 19 nt, synthetic construct
  source 1..19: mol_type = other RNA
accctgccacccaactttg

SEQ ID NO: 570 - RNA, 19 nt, synthetic construct
  source 1..19: mol_type = other RNA
gcccttggcatgatgcctc

SEQ ID NO: 571 - RNA, 19 nt, synthetic construct
  source 1..19: mol_type = other RNA
tccaaacggccacaataca

SEQ ID NO: 572 - RNA, 19 nt, synthetic construct
  source 1..19: mol_type = other RNA
cttcagtctggccatgaag

SEQ ID NO: 573 - RNA, 19 nt, synthetic construct
  source 1..19: mol_type = other RNA
cctgaagtcattggaccac

SEQ ID NO: 574 - RNA, 19 nt, synthetic construct
  source 1..19: mol_type = other RNA
ggagtggtcttccactgcc

SEQ ID NO: 575 - RNA, 19 nt, synthetic construct
  source 1..19: mol_type = other RNA
aactttggcaagcgcccca

SEQ ID NO: 576 - RNA, 19 nt, synthetic construct
  source 1..19: mol_type = other RNA
cacttatggaagcctaaag

SEQ ID NO: 577 - RNA, 19 nt, synthetic construct
  source 1..19: mol_type = other RNA
agggatcgtcctcaaatcc

SEQ ID NO: 578 - RNA, 19 nt, synthetic construct
  source 1..19: mol_type = other RNA
gtcctcaaatccaaacggc

SEQ ID NO: 579 - RNA, 19 nt, synthetic construct
  source 1..19: mol_type = other RNA
aacaaaaatgatctacaca

SEQ ID NO: 580 - RNA, 19 nt, synthetic construct
  source 1..19: mol_type = other RNA
ggctgcaccatggagttca

SEQ ID NO: 581 - RNA, 19 nt, synthetic construct
  source 1..19: mol_type = other RNA
ccttgcaccatagggatcg

SEQ ID NO: 582 - RNA, 19 nt, synthetic construct
  source 1..19: mol_type = other RNA
cctgccacccaactttggc

SEQ ID NO: 583 - RNA, 19 nt, synthetic construct
  source 1..19: mol_type = other RNA
cattccttgcaccataggg

SEQ ID NO: 584 - RNA, 19 nt, synthetic construct
  source 1..19: mol_type = other RNA
ggccacaatacatgcgcta

SEQ ID NO: 585 - RNA, 19 nt, synthetic construct
  source 1..19: mol_type = other RNA
ttgcacagcctagcccttc

SEQ ID NO: 586 - RNA, 19 nt, synthetic construct
  source 1..19: mol_type = other RNA
catgctctcgctgggctgc

SEQ ID NO: 587 - RNA, 19 nt, synthetic construct
  source 1..19: mol_type = other RNA
acccaactttggcaagcgc

SEQ ID NO: 588 - RNA, 19 nt, synthetic construct
  source 1..19: mol_type = other RNA
acaaggtgccctataaagg

SEQ ID NO: 589 - RNA, 19 nt, synthetic construct
  source 1..19: mol_type = other RNA
aaggtgccctataaaggca

SEQ ID NO: 590 - RNA, 19 nt, synthetic construct
  source 1..19: mol_type = other RNA
atcgtcctcaaatccaaac

SEQ ID NO: 591 - RNA, 19 nt, synthetic construct
  source 1..19: mol_type = other RNA
ggctcacttatggaagcct

SEQ ID NO: 592 - RNA, 19 nt, synthetic construct
  source 1..19: mol_type = other RNA
aagatcaaggctcacttat

SEQ ID NO: 593 - RNA, 19 nt, synthetic construct
  source 1..19: mol_type = other RNA
atcaaggctcacttatgga

SEQ ID NO: 594 - RNA, 19 nt, synthetic construct
  source 1..19: mol_type = other RNA
ctcagcattgtgatgacca

SEQ ID NO: 595 - RNA, 19 nt, synthetic construct
  source 1..19: mol_type = other RNA
aggtgccctataaaggcat

SEQ ID NO: 596 - RNA, 19 nt, synthetic construct
  source 1..19: mol_type = other RNA
tcattccttgcaccatagg

SEQ ID NO: 597 - RNA, 19 nt, synthetic construct
  source 1..19: mol_type = other RNA
gtcatcaagggagggatga

SEQ ID NO: 598 - RNA, 19 nt, synthetic construct
  source 1..19: mol_type = other RNA
caatacatgcgctatgtca

SEQ ID NO: 599 - RNA, 19 nt, synthetic construct
  source 1..19: mol_type = other RNA
gacaaggtgccctataaag

SEQ ID NO: 600 - RNA, 19 nt, synthetic construct
  source 1..19: mol_type = other RNA
aaggagtggtcttccactg

SEQ ID NO: 601 - RNA, 19 nt, synthetic construct
  source 1..19: mol_type = other RNA
tccccttgcacagcctagc

SEQ ID NO: 602 - RNA, 19 nt, synthetic construct
  source 1..19: mol_type = other RNA
acatgcgctatgtcatcaa

SEQ ID NO: 603 - RNA, 19 nt, synthetic construct
  source 1..19: mol_type = other RNA
aatatatatgtttaaccca

SEQ ID NO: 604 - RNA, 19 nt, synthetic construct
  source 1..19: mol_type = other RNA
ttcatcatgctctcgctgg

SEQ ID NO: 605 - RNA, 19 nt, synthetic construct
  source 1..19: mol_type = other RNA
atcatgctctcgctgggct

SEQ ID NO: 606 - RNA, 19 nt, synthetic construct
  source 1..19: mol_type = other RNA
aaggacaaggtgccctata

SEQ ID NO: 607 - RNA, 19 nt, synthetic construct
  source 1..19: mol_type = other RNA
ctccccttgcacagcctag

SEQ ID NO: 608 - RNA, 19 nt, synthetic construct
  source 1..19: mol_type = other RNA
ttgcaccatagggatcgtc

SEQ ID NO: 609 - RNA, 19 nt, synthetic construct
  source 1..19: mol_type = other RNA
caaggtgccctataaaggc

SEQ ID NO: 610 - RNA, 19 nt, synthetic construct
  source 1..19: mol_type = other RNA
gttctcattccttgcacca

SEQ ID NO: 611 - RNA, 19 nt, synthetic construct
  source 1..19: mol_type = other RNA
catcatgctctcgctgggc

SEQ ID NO: 612 - RNA, 21 nt, synthetic construct
  source 1..21: mol_type = other RNA
cccttgatgacatagcgcatg

SEQ ID NO: 613 - RNA, 21 nt, synthetic construct
  source 1..21: mol_type = other RNA
agactgaagacattggacagg

SEQ ID NO: 614 - RNA, 21 nt, synthetic construct
  source 1..21: mol_type = other RNA
ccataagtgagccttgatctt

SEQ ID NO: 615 - RNA, 21 nt, synthetic construct
  source 1..21: mol_type = other RNA
atggccagactgaagacattg

SEQ ID NO: 616 - RNA, 21 nt, synthetic construct
  source 1..21: mol_type = other RNA
acgatccctatggtgcaagga

SEQ ID NO: 617 - RNA, 21 nt, synthetic construct
  source 1..21: mol_type = other RNA
gaaaagtggtccaatgacttc

SEQ ID NO: 618 - RNA, 21 nt, synthetic construct
  source 1..21: mol_type = other RNA
agtggtccaatgacttcaggt

SEQ ID NO: 619 - RNA, 21 nt, synthetic construct
  source 1..21: mol_type = other RNA
tagatgtactggaaatgctgg

SEQ ID NO: 620 - RNA, 21 nt, synthetic construct
  source 1..21: mol_type = other RNA
tgatgatcatccctcccttga

SEQ ID NO: 621 - RNA, 21 nt, synthetic construct
  source 1..21: mol_type = other RNA
attgattagttcaggaattga

SEQ ID NO: 622 - RNA, 21 nt, synthetic construct
  source 1..21: mol_type = other RNA
catcacaatgctgaggttcat

SEQ ID NO: 623 - RNA, 21 nt, synthetic construct
  source 1..21: mol_type = other RNA
attagttcaggaattgagtga

SEQ ID NO: 624 - RNA, 21 nt, synthetic construct
  source 1..21: mol_type = other RNA
ggtgtcatggcaaacatgatg

SEQ ID NO: 625 - RNA, 21 nt, synthetic construct
  source 1..21: mol_type = other RNA
gatttgaggacgatccctatg

SEQ ID NO: 626 - RNA, 21 nt, synthetic construct
  source 1..21: mol_type = other RNA
gaatgatgatcatccctccct

SEQ ID NO: 627 - RNA, 21 nt, synthetic construct
  source 1..21: mol_type = other RNA
cttgatgacatagcgcatgta

SEQ ID NO: 628 - RNA, 21 nt, synthetic construct
  source 1..21: mol_type = other RNA
ttagttcaggaattgagtgac

SEQ ID NO: 629 - RNA, 21 nt, synthetic construct
  source 1..21: mol_type = other RNA
atgccatactgtgccaccagg

SEQ ID NO: 630 - RNA, 21 nt, synthetic construct
  source 1..21: mol_type = other RNA
aagccaataaaaggcatcagg

SEQ ID NO: 631 - RNA, 21 nt, synthetic construct
  source 1..21: mol_type = other RNA
aaatcatgtagaggaggggaa

SEQ ID NO: 632 - RNA, 21 nt, synthetic construct
  source 1..21: mol_type = other RNA
gaggcagtggaagaccactcc

SEQ ID NO: 633 - RNA, 21 nt, synthetic construct
  source 1..21: mol_type = other RNA
caggtctgtggggcgcttgcc

SEQ ID NO: 634 - RNA, 21 nt, synthetic construct
  source 1..21: mol_type = other RNA
atggtgcaaggaatgagaacc

SEQ ID NO: 635 - RNA, 21 nt, synthetic construct
  source 1..21: mol_type = other RNA
tgatagatgtactggaaatgc

SEQ ID NO: 636 - RNA, 21 nt, synthetic construct
  source 1..21: mol_type = other RNA
tggtgtcatggcaaacatgat

SEQ ID NO: 637 - RNA, 21 nt, synthetic construct
  source 1..21: mol_type = other RNA
aaaacttggaatgggatttgg

SEQ ID NO: 638 - RNA, 21 nt, synthetic construct
  source 1..21: mol_type = other RNA
cacaatgctgaggttcatgtc

SEQ ID NO: 639 - RNA, 21 nt, synthetic construct
  source 1..21: mol_type = other RNA
catagcgcatgtattgtggcc

SEQ ID NO: 640 - RNA, 21 nt, synthetic construct
  source 1..21: mol_type = other RNA
tagttcaggaattgagtgact

SEQ ID NO: 641 - RNA, 21 nt, synthetic construct
  source 1..21: mol_type = other RNA
gatgccatactgtgccaccag

SEQ ID NO: 642 - RNA, 21 nt, synthetic construct
  source 1..21: mol_type = other RNA
ataacccagcagaaagccaat

SEQ ID NO: 643 - RNA, 21 nt, synthetic construct
  source 1..21: mol_type = other RNA
gaatgggatttgggtatttga

SEQ ID NO: 644 - RNA, 21 nt, synthetic construct
  source 1..21: mol_type = other RNA
cagcgagagcatgatgaagaa

SEQ ID NO: 645 - RNA, 21 nt, synthetic construct
  source 1..21: mol_type = other RNA
atgggttaaacatatatattg

SEQ ID NO: 646 - RNA, 21 nt, synthetic construct
  source 1..21: mol_type = other RNA
catcctcctgtgaggcagtgg

SEQ ID NO: 647 - RNA, 21 nt, synthetic construct
  source 1..21: mol_type = other RNA
tgtggccgtttggatttgagg

SEQ ID NO: 648 - RNA, 21 nt, synthetic construct
  source 1..21: mol_type = other RNA
agctggaaaatcatgtagagg

SEQ ID NO: 649 - RNA, 21 nt, synthetic construct
  source 1..21: mol_type = other RNA
gttttatccttgggagtcttg

SEQ ID NO: 650 - RNA, 21 nt, synthetic construct
  source 1..21: mol_type = other RNA
cgcttgccaaagttgggtggc

SEQ ID NO: 651 - RNA, 21 nt, synthetic construct
  source 1..21: mol_type = other RNA
ggccgtttggatttgaggacg

SEQ ID NO: 652 - RNA, 21 nt, synthetic construct
  source 1..21: mol_type = other RNA
gacggccacactgcacaagag

SEQ ID NO: 653 - RNA, 21 nt, synthetic construct
  source 1..21: mol_type = other RNA
ccgtttcttgtgcagttcttg

SEQ ID NO: 654 - RNA, 21 nt, synthetic construct
  source 1..21: mol_type = other RNA
tgactccgtttcttgtgcagt

SEQ ID NO: 655 - RNA, 21 nt, synthetic construct
  source 1..21: mol_type = other RNA
tggtccaatgacttcaggtgg

SEQ ID NO: 656 - RNA, 21 nt, synthetic construct
  source 1..21: mol_type = other RNA
cttgccaaagttgggtggcag

SEQ ID NO: 657 - RNA, 21 nt, synthetic construct
  source 1..21: mol_type = other RNA
aggacgatccctatggtgcaa

SEQ ID NO: 658 - RNA, 21 nt, synthetic construct
  source 1..21: mol_type = other RNA
aactgtgacggccacactgca

SEQ ID NO: 659 - RNA, 21 nt, synthetic construct
  source 1..21: mol_type = other RNA
catgtattgtggccgtttgga

SEQ ID NO: 660 - RNA, 21 nt, synthetic construct
  source 1..21: mol_type = other RNA
gagagaacataacccagcaga

SEQ ID NO: 661 - RNA, 21 nt, synthetic construct
  source 1..21: mol_type = other RNA
ttaggcttccataagtgagcc

SEQ ID NO: 662 - RNA, 21 nt, synthetic construct
  source 1..21: mol_type = other RNA
agagagaactgtgacggccac

SEQ ID NO: 663 - RNA, 21 nt, synthetic construct
  source 1..21: mol_type = other RNA
ctgtgacggccacactgcaca

SEQ ID NO: 664 - RNA, 21 nt, synthetic construct
  source 1..21: mol_type = other RNA
cagcccagcgagagcatgatg

SEQ ID NO: 665 - RNA, 21 nt, synthetic construct
  source 1..21: mol_type = other RNA
atttgaggacgatccctatgg

SEQ ID NO: 666 - RNA, 21 nt, synthetic construct
  source 1..21: mol_type = other RNA
tgggtcacaaaacttggaatg

SEQ ID NO: 667 - RNA, 21 nt, synthetic construct
  source 1..21: mol_type = other RNA
ggtggtcatcacaatgctgag

SEQ ID NO: 668 - RNA, 21 nt, synthetic construct
  source 1..21: mol_type = other RNA
actgtgacggccacactgcac

SEQ ID NO: 669 - RNA, 21 nt, synthetic construct
  source 1..21: mol_type = other RNA
tccaagctggaaaatcatgta

SEQ ID NO: 670 - RNA, 21 nt, synthetic construct
  source 1..21: mol_type = other RNA
taggcttccataagtgagcct

SEQ ID NO: 671 - RNA, 21 nt, synthetic construct
  source 1..21: mol_type = other RNA
gtattgtggccgtttggattt

SEQ ID NO: 672 - RNA, 21 nt, synthetic construct
  source 1..21: mol_type = other RNA
tgatcatccctcccttgatga

SEQ ID NO: 673 - RNA, 21 nt, synthetic construct
  source 1..21: mol_type = other RNA
agcgcatgtattgtggccgtt

SEQ ID NO: 674 - RNA, 21 nt, synthetic construct
  source 1..21: mol_type = other RNA
gcgttgtgggcctccatcctc

SEQ ID NO: 675 - RNA, 21 nt, synthetic construct
  source 1..21: mol_type = other RNA
atactgtgccaccagggcgat

SEQ ID NO: 676 - RNA, 21 nt, synthetic construct
  source 1..21: mol_type = other RNA
aggtctgtggggcgcttgcca

SEQ ID NO: 677 - RNA, 21 nt, synthetic construct
  source 1..21: mol_type = other RNA
ctgtctgtgttcccggccaag

SEQ ID NO: 678 - RNA, 21 nt, synthetic construct
  source 1..21: mol_type = other RNA
atgatgatcatccctcccttg

SEQ ID NO: 679 - RNA, 21 nt, synthetic construct
  source 1..21: mol_type = other RNA
gggcgcttgccaaagttgggt

SEQ ID NO: 680 - RNA, 21 nt, synthetic construct
  source 1..21: mol_type = other RNA
gggcatgatgccatactgtgc

SEQ ID NO: 681 - RNA, 21 nt, synthetic construct
  source 1..21: mol_type = other RNA
gactgaagacattggacaggt

SEQ ID NO: 682 - RNA, 21 nt, synthetic construct
  source 1..21: mol_type = other RNA
gaggacgatccctatggtgca

SEQ ID NO: 683 - RNA, 21 nt, synthetic construct
  source 1..21: mol_type = other RNA
tgaggacgatccctatggtgc

SEQ ID NO: 684 - RNA, 21 nt, synthetic construct
  source 1..21: mol_type = other RNA
ccgtttggatttgaggacgat

SEQ ID NO: 685 - RNA, 21 nt, synthetic construct
  source 1..21: mol_type = other RNA
cgttgtgggcctccatcctcc

SEQ ID NO: 686 - RNA, 21 nt, synthetic construct
  source 1..21: mol_type = other RNA
ccttgatgacatagcgcatgt

SEQ ID NO: 687 - RNA, 21 nt, synthetic construct
  source 1..21: mol_type = other RNA
ggaatgggatttgggtatttg

SEQ ID NO: 688 - RNA, 21 nt, synthetic construct
  source 1..21: mol_type = other RNA
tttgaggacgatccctatggt

SEQ ID NO: 689 - RNA, 21 nt, synthetic construct
  source 1..21: mol_type = other RNA
tcccttgatgacatagcgcat

SEQ ID NO: 690 - RNA, 21 nt, synthetic construct
  source 1..21: mol_type = other RNA
gaggggcatgatgccatactg

SEQ ID NO: 691 - RNA, 21 nt, synthetic construct
  source 1..21: mol_type = other RNA
tccctatggtgcaaggaatga

SEQ ID NO: 692 - RNA, 21 nt, synthetic construct
  source 1..21: mol_type = other RNA
tttatagggcaccttgtcctt

SEQ ID NO: 693 - RNA, 21 nt, synthetic construct
  source 1..21: mol_type = other RNA
ggacgatccctatggtgcaag

SEQ ID NO: 694 - RNA, 21 nt, synthetic construct
  source 1..21: mol_type = other RNA
gaactgtgacggccacactgc

SEQ ID NO: 695 - RNA, 21 nt, synthetic construct
  source 1..21: mol_type = other RNA
tttaggcttccataagtgagc

SEQ ID NO: 696 - RNA, 21 nt, synthetic construct
  source 1..21: mol_type = other RNA
catactgtgccaccagggcga

SEQ ID NO: 697 - RNA, 21 nt, synthetic construct
  source 1..21: mol_type = other RNA
ggggcatgatgccatactgtg

SEQ ID NO: 698 - RNA, 21 nt, synthetic construct
  source 1..21: mol_type = other RNA
agaacataacccagcagaaag

SEQ ID NO: 699 - RNA, 21 nt, synthetic construct
  source 1..21: mol_type = other RNA
gactccgtttcttgtgcagtt

SEQ ID NO: 700 - RNA, 21 nt, synthetic construct
  source 1..21: mol_type = other RNA
caaagttgggtggcagggtga

SEQ ID NO: 701 - RNA, 21 nt, synthetic construct
  source 1..21: mol_type = other RNA
gaggcatcatgccaagggcac

SEQ ID NO: 702 - RNA, 21 nt, synthetic construct
  source 1..21: mol_type = other RNA
tgtattgtggccgtttggatt

SEQ ID NO: 703 - RNA, 21 nt, synthetic construct
  source 1..21: mol_type = other RNA
cttcatggccagactgaagac

SEQ ID NO: 704 - RNA, 21 nt, synthetic construct
  source 1..21: mol_type = other RNA
gtggtccaatgacttcaggtg

SEQ ID NO: 705 - RNA, 21 nt, synthetic construct
  source 1..21: mol_type = other RNA
ggcagtggaagaccactcctt

SEQ ID NO: 706 - RNA, 21 nt, synthetic construct
  source 1..21: mol_type = other RNA
tggggcgcttgccaaagttgg

SEQ ID NO: 707 - RNA, 21 nt, synthetic construct
  source 1..21: mol_type = other RNA
ctttaggcttccataagtgag

SEQ ID NO: 708 - RNA, 21 nt, synthetic construct
  source 1..21: mol_type = other RNA
ggatttgaggacgatccctat

SEQ ID NO: 709 - RNA, 21 nt, synthetic construct
  source 1..21: mol_type = other RNA
gccgtttggatttgaggacga

SEQ ID NO: 710 - RNA, 21 nt, synthetic construct
  source 1..21: mol_type = other RNA
tgtgtagatcatttttgtttt

SEQ ID NO: 711 - RNA, 21 nt, synthetic construct
  source 1..21: mol_type = other RNA
tgaactccatggtgcagccca

SEQ ID NO: 712 - RNA, 21 nt, synthetic construct
  source 1..21: mol_type = other RNA
cgatccctatggtgcaaggaa

SEQ ID NO: 713 - RNA, 21 nt, synthetic construct
  source 1..21: mol_type = other RNA
gccaaagttgggtggcagggt

SEQ ID NO: 714 - RNA, 21 nt, synthetic construct
  source 1..21: mol_type = other RNA
ccctatggtgcaaggaatgag

SEQ ID NO: 715 - RNA, 21 nt, synthetic construct
  source 1..21: mol_type = other RNA
tagcgcatgtattgtggccgt

SEQ ID NO: 716 - RNA, 21 nt, synthetic construct
  source 1..21: mol_type = other RNA
gaagggctaggctgtgcaagg

SEQ ID NO: 717 - RNA, 21 nt, synthetic construct
  source 1..21: mol_type = other RNA
gcagcccagcgagagcatgat

SEQ ID NO: 718 - RNA, 21 nt, synthetic construct
  source 1..21: mol_type = other RNA
gcgcttgccaaagttgggtgg

SEQ ID NO: 719 - RNA, 21 nt, synthetic construct
  source 1..21: mol_type = other RNA
cctttatagggcaccttgtcc

SEQ ID NO: 720 - RNA, 21 nt, synthetic construct
  source 1..21: mol_type = other RNA
tgcctttatagggcaccttgt

SEQ ID NO: 721 - RNA, 21 nt, synthetic construct
  source 1..21: mol_type = other RNA
gtttggatttgaggacgatcc

SEQ ID NO: 722 - RNA, 21 nt, synthetic construct
  source 1..21: mol_type = other RNA
aggcttccataagtgagcctt

SEQ ID NO: 723 - RNA, 21 nt, synthetic construct
  source 1..21: mol_type = other RNA
ataagtgagccttgatcttgc

SEQ ID NO: 724 - RNA, 21 nt, synthetic construct
  source 1..21: mol_type = other RNA
tccataagtgagccttgatct

SEQ ID NO: 725 - RNA, 21 nt, synthetic construct
  source 1..21: mol_type = other RNA
tggtcatcacaatgctgaggt

SEQ ID NO: 726 - RNA, 21 nt, synthetic construct
  source 1..21: mol_type = other RNA
atgcctttatagggcaccttg

SEQ ID NO: 727 - RNA, 21 nt, synthetic construct
  source 1..21: mol_type = other RNA
cctatggtgcaaggaatgaga

SEQ ID NO: 728 - RNA, 21 nt, synthetic construct
  source 1..21: mol_type = other RNA
tcatccctcccttgatgacat

SEQ ID NO: 729 - RNA, 21 nt, synthetic construct
  source 1..21: mol_type = other RNA
tgacatagcgcatgtattgtg

SEQ ID NO: 730 - RNA, 21 nt, synthetic construct
  source 1..21: mol_type = other RNA
ctttatagggcaccttgtcct

SEQ ID NO: 731 - RNA, 21 nt, synthetic construct
  source 1..21: mol_type = other RNA
cagtggaagaccactccttgt

SEQ ID NO: 732 - RNA, 21 nt, synthetic construct
  source 1..21: mol_type = other RNA
gctaggctgtgcaaggggagc

SEQ ID NO: 733 - RNA, 21 nt, synthetic construct
  source 1..21: mol_type = other RNA
ttgatgacatagcgcatgtat

SEQ ID NO: 734 - RNA, 21 nt, synthetic construct
  source 1..21: mol_type = other RNA
tgggttaaacatatatattga

SEQ ID NO: 735 - RNA, 21 nt, synthetic construct
  source 1..21: mol_type = other RNA
ccagcgagagcatgatgaaga

SEQ ID NO: 736 - RNA, 21 nt, synthetic construct
  source 1..21: mol_type = other RNA
agcccagcgagagcatgatga

SEQ ID NO: 737 - RNA, 21 nt, synthetic construct
  source 1..21: mol_type = other RNA
tatagggcaccttgtccttca

SEQ ID NO: 738 - RNA, 21 nt, synthetic construct
  source 1..21: mol_type = other RNA
ctaggctgtgcaaggggagca

SEQ ID NO: 739 - RNA, 21 nt, synthetic construct
  source 1..21: mol_type = other RNA
gacgatccctatggtgcaagg

SEQ ID NO: 740 - RNA, 21 nt, synthetic construct
  source 1..21: mol_type = other RNA
gcctttatagggcaccttgtc

SEQ ID NO: 741 - RNA, 21 nt, synthetic construct
  source 1..21: mol_type = other RNA
tggtgcaaggaatgagaacca

SEQ ID NO: 742 - RNA, 21 nt, synthetic construct
  source 1..21: mol_type = other RNA
gcccagcgagagcatgatgaa

SEQ ID NO: 743 - RNA, 19 nt, synthetic construct
  source 1..19: mol_type = other RNA
  modified_base 1: mod_base = OTHER; note = 2'-O-methyl modified nucleotide with phosphorothioate linkage
  modified_base 2: mod_base = OTHER; note = 2'-O-methyl modified nucleotide with phosphorothioate linkage
  modified_base 3: mod_base = OTHER; note = 2'-O-methyl modified nucleotide
  modified_base 4: mod_base = OTHER; note = 2'-O-methyl modified nucleotide
  modified_base 5: mod_base = OTHER; note = 2'-fluoro modified nucleotide
  modified_base 6: mod_base = OTHER; note = 2'-O-methyl modified nucleotide
  modified_base 7: mod_base = OTHER; note = 2'-fluoro modified nucleotide
  modified_base 8: mod_base = OTHER; note = 2'-fluoro modified nucleotide
  modified_base 9: mod_base = OTHER; note = 2'-fluoro modified nucleotide
  modified_base 10: mod_base = OTHER; note = 2'-O-methyl modified nucleotide
  modified_base 11: mod_base = OTHER; note = 2'-O-methyl modified nucleotide
  modified_base 12: mod_base = OTHER; note = 2'-O-methyl modified nucleotide
  modified_base 13: mod_base = OTHER; note = 2'-O-methyl modified nucleotide
  modified_base 14: mod_base = OTHER; note = 2'-O-methyl modified nucleotide
  modified_base 15: mod_base = OTHER; note = 2'-O-methyl modified nucleotide
  modified_base 16: mod_base = OTHER; note = 2'-O-methyl modified nucleotide
  modified_base 17: mod_base = OTHER; note = 2'-O-methyl modified nucleotide
  modified_base 18: mod_base = OTHER; note = 2'-O-methyl modified nucleotide
  modified_base 19: mod_base = OTHER; note = 2'-O-methyl modified nucleotide
gtcctcaaatccaaacgga

SEQ ID NO: 744 - RNA, 19 nt, synthetic construct
  source 1..19: mol_type = other RNA
  modified_base 1: mod_base = OTHER; note = 2'-O-methyl modified nucleotide with phosphorothioate linkage
  modified_base 2: mod_base = OTHER; note = 2'-O-methyl modified nucleotide with phosphorothioate linkage
  modified_base 3: mod_base = OTHER; note = 2'-O-methyl modified nucleotide
  modified_base 4: mod_base = OTHER; note = 2'-O-methyl modified nucleotide
  modified_base 5: mod_base = OTHER; note = 2'-fluoro modified nucleotide
  modified_base 6: mod_base = OTHER; note = 2'-O-methyl modified nucleotide
  modified_base 7: mod_base = OTHER; note = 2'-fluoro modified nucleotide
  modified_base 8: mod_base = OTHER; note = 2'-fluoro modified nucleotide
  modified_base 9: mod_base = OTHER; note = 2'-fluoro modified nucleotide
  modified_base 10: mod_base = OTHER; note = 2'-O-methyl modified nucleotide
  modified_base 11: mod_base = OTHER; note = 2'-O-methyl modified nucleotide
  modified_base 12: mod_base = OTHER; note = 2'-O-methyl modified nucleotide
  modified_base 13: mod_base = OTHER; note = 2'-O-methyl modified nucleotide
  modified_base 14: mod_base = OTHER; note = 2'-O-methyl modified nucleotide
  modified_base 15: mod_base = OTHER; note = 2'-O-methyl modified nucleotide
  modified_base 16: mod_base = OTHER; note = 2'-O-methyl modified nucleotide
  modified_base 17: mod_base = OTHER; note = 2'-O-methyl modified nucleotide
  modified_base 18: mod_base = OTHER; note = 2'-O-methyl modified nucleotide
  modified_base 19: mod_base = OTHER; note = 2'-O-methyl modified nucleotide
gcaccatagggatcgtcca

SEQ ID NO: 745 - RNA, 19 nt, synthetic construct
  source 1..19: mol_type = other RNA
  modified_base 1: mod_base = OTHER; note = 2'-O-methyl modified nucleotide with phosphorothioate linkage
  modified_base 2: mod_base = OTHER; note = 2'-O-methyl modified nucleotide with phosphorothioate linkage
  modified_base 3: mod_base = OTHER; note = 2'-O-methyl modified nucleotide
  modified_base 4: mod_base = OTHER; note = 2'-O-methyl modified nucleotide
  modified_base 5: mod_base = OTHER; note = 2'-fluoro modified nucleotide
  modified_base 6: mod_base = OTHER; note = 2'-O-methyl modified nucleotide
  modified_base 7: mod_base = OTHER; note = 2'-fluoro modified nucleotide
  modified_base 8: mod_base = OTHER; note = 2'-fluoro modified nucleotide
  modified_base 9: mod_base = OTHER; note = 2'-fluoro modified nucleotide
  modified_base 10: mod_base = OTHER; note = 2'-O-methyl modified nucleotide
  modified_base 11: mod_base = OTHER; note = 2'-O-methyl modified nucleotide
  modified_base 12: mod_base = OTHER; note = 2'-O-methyl modified nucleotide
  modified_base 13: mod_base = OTHER; note = 2'-O-methyl modified nucleotide
  modified_base 14: mod_base = OTHER; note = 2'-O-methyl modified nucleotide
  modified_base 15: mod_base = OTHER; note = 2'-O-methyl modified nucleotide
  modified_base 16: mod_base = OTHER; note = 2'-O-methyl modified nucleotide
  modified_base 17: mod_base = OTHER; note = 2'-O-methyl modified nucleotide
  modified_base 18: mod_base = OTHER; note = 2'-O-methyl modified nucleotide
  modified_base 19: mod_base = OTHER; note = 2'-O-methyl modified nucleotide
attccttgcaccataggga

SEQ ID NO: 746 - RNA, 19 nt, synthetic construct
  source 1..19: mol_type = other RNA
  modified_base 1: mod_base = OTHER; note = 2'-O-methyl modified nucleotide with phosphorothioate linkage
  modified_base 2: mod_base = OTHER; note = 2'-O-methyl modified nucleotide with phosphorothioate linkage
  modified_base 3: mod_base = OTHER; note = 2'-O-methyl modified nucleotide
  modified_base 4: mod_base = OTHER; note = 2'-O-methyl modified nucleotide
  modified_base 5: mod_base = OTHER; note = 2'-fluoro modified nucleotide
  modified_base 6: mod_base = OTHER; note = 2'-O-methyl modified nucleotide
  modified_base 7: mod_base = OTHER; note = 2'-fluoro modified nucleotide
  modified_base 8: mod_base = OTHER; note = 2'-fluoro modified nucleotide
  modified_base 9: mod_base = OTHER; note = 2'-fluoro modified nucleotide
  modified_base 10: mod_base = OTHER; note = 2'-O-methyl modified nucleotide
  modified_base 11: mod_base = OTHER; note = 2'-O-methyl modified nucleotide
  modified_base 12: mod_base = OTHER; note = 2'-O-methyl modified nucleotide
  modified_base 13: mod_base = OTHER; note = 2'-O-methyl modified nucleotide
  modified_base 14: mod_base = OTHER; note = 2'-O-methyl modified nucleotide
  modified_base 15: mod_base = OTHER; note = 2'-O-methyl modified nucleotide
  modified_base 16: mod_base = OTHER; note = 2'-O-methyl modified nucleotide
  modified_base 17: mod_base = OTHER; note = 2'-O-methyl modified nucleotide
  modified_base 18: mod_base = OTHER; note = 2'-O-methyl modified nucleotide
  modified_base 19: mod_base = OTHER; note = 2'-O-methyl modified nucleotide
ggtggcacagtatggcata

SEQ ID NO: 747 - RNA, 19 nt, synthetic construct
  source 1..19: mol_type = other RNA
  modified_base 1: mod_base = OTHER; note = 2'-O-methyl modified nucleotide with phosphorothioate linkage
  modified_base 2: mod_base = OTHER; note = 2'-O-methyl modified nucleotide with phosphorothioate linkage
  modified_base 3: mod_base = OTHER; note = 2'-O-methyl modified nucleotide
  modified_base 4: mod_base = OTHER; note = 2'-O-methyl modified nucleotide
  modified_base 5: mod_base = OTHER; note = 2'-fluoro modified nucleotide
  modified_base 6: mod_base = OTHER; note = 2'-O-methyl modified nucleotide
  modified_base 7: mod_base = OTHER; note = 2'-fluoro modified nucleotide
  modified_base 8: mod_base = OTHER; note = 2'-fluoro modified nucleotide
  modified_base 9: mod_base = OTHER; note = 2'-fluoro modified nucleotide
  modified_base 10: mod_base = OTHER; note = 2'-O-methyl modified nucleotide
  modified_base 11: mod_base = OTHER; note = 2'-O-methyl modified nucleotide
  modified_base 12: mod_base = OTHER; note = 2'-O-methyl modified nucleotide
  modified_base 13: mod_base = OTHER; note = 2'-O-methyl modified nucleotide
  modified_base 14: mod_base = OTHER; note = 2'-O-methyl modified nucleotide
  modified_base 15: mod_base = OTHER; note = 2'-O-methyl modified nucleotide
  modified_base 16: mod_base = OTHER; note = 2'-O-methyl modified nucleotide
  modified_base 17: mod_base = OTHER; note = 2'-O-methyl modified nucleotide
  modified_base 18: mod_base = OTHER; note = 2'-O-methyl modified nucleotide
  modified_base 19: mod_base = OTHER; note = 2'-O-methyl modified nucleotide
ctgcacaagaaacggagta

SEQ ID NO: 748 - RNA, 19 nt, synthetic construct
  source 1..19: mol_type = other RNA
  modified_base 1: mod_base = OTHER; note = 2'-O-methyl modified nucleotide with phosphorothioate linkage
  modified_base 2: mod_base = OTHER; note = 2'-O-methyl modified nucleotide with phosphorothioate linkage
  modified_base 3: mod_base = OTHER; note = 2'-O-methyl modified nucleotide
  modified_base 4: mod_base = OTHER; note = 2'-O-methyl modified nucleotide
  modified_base 5: mod_base = OTHER; note = 2'-fluoro modified nucleotide
  modified_base 6: mod_base = OTHER; note = 2'-O-methyl modified nucleotide
  modified_base 7: mod_base = OTHER; note = 2'-fluoro modified nucleotide
  modified_base 8: mod_base = OTHER; note = 2'-fluoro modified nucleotide
  modified_base 9: mod_base = OTHER; note = 2'-fluoro modified nucleotide
  modified_base 10: mod_base = OTHER; note = 2'-O-methyl modified nucleotide
  modified_base 11: mod_base = OTHER; note = 2'-O-methyl modified nucleotide
  modified_base 12: mod_base = OTHER; note = 2'-O-methyl modified nucleotide
  modified_base 13: mod_base = OTHER; note = 2'-O-methyl modified nucleotide
  modified_base 14: mod_base = OTHER; note = 2'-O-methyl modified nucleotide
  modified_base 15: mod_base = OTHER; note = 2'-O-methyl modified nucleotide
  modified_base 16: mod_base = OTHER; note = 2'-O-methyl modified nucleotide
  modified_base 17: mod_base = OTHER; note = 2'-O-methyl modified nucleotide
  modified_base 18: mod_base = OTHER; note = 2'-O-methyl modified nucleotide
  modified_base 19: mod_base = OTHER; note = 2'-O-methyl modified nucleotide
ttccaagttttgtgaccca

SEQ ID NO: 749 - RNA, 19 nt, synthetic construct
  source 1..19: mol_type = other RNA
  modified_base 1: mod_base = OTHER; note = 2'-O-methyl modified nucleotide with phosphorothioate linkage
  modified_base 2: mod_base = OTHER; note = 2'-O-methyl modified nucleotide with phosphorothioate linkage
  modified_base 3: mod_base = OTHER; note = 2'-O-methyl modified nucleotide
  modified_base 4: mod_base = OTHER; note = 2'-O-methyl modified nucleotide
  modified_base 5: mod_base = OTHER; note = 2'-fluoro modified nucleotide
  modified_base 6: mod_base = OTHER; note = 2'-O-methyl modified nucleotide
  modified_base 7: mod_base = OTHER; note = 2'-fluoro modified nucleotide
  modified_base 8: mod_base = OTHER; note = 2'-fluoro modified nucleotide
  modified_base 9: mod_base = OTHER; note = 2'-fluoro modified nucleotide
  modified_base 10: mod_base = OTHER; note = 2'-O-methyl modified nucleotide
  modified_base 11: mod_base = OTHER; note = 2'-O-methyl modified nucleotide
  modified_base 12: mod_base = OTHER; note = 2'-O-methyl modified nucleotide
  modified_base 13: mod_base = OTHER; note = 2'-O-methyl modified nucleotide
  modified_base 14: mod_base = OTHER; note = 2'-O-methyl modified nucleotide
  modified_base 15: mod_base = OTHER; note = 2'-O-methyl modified nucleotide
  modified_base 16: mod_base = OTHER; note = 2'-O-methyl modified nucleotide
  modified_base 17: mod_base = OTHER; note = 2'-O-methyl modified nucleotide
  modified_base 18: mod_base = OTHER; note = 2'-O-methyl modified nucleotide
  modified_base 19: mod_base = OTHER; note = 2'-O-methyl modified nucleotide
catgaacctcagcattgta

SEQ ID NO: 750 - RNA, 19 nt, synthetic construct
  source 1..19: mol_type = other RNA
  modified_base 1: mod_base = OTHER; note = 2'-O-methyl modified nucleotide with phosphorothioate linkage
  modified_base 2: mod_base = OTHER; note = 2'-O-methyl modified nucleotide with phosphorothioate linkage
  modified_base 3: mod_base = OTHER; note = 2'-O-methyl modified nucleotide
  modified_base 4: mod_base = OTHER; note = 2'-O-methyl modified nucleotide
  modified_base 5: mod_base = OTHER; note = 2'-fluoro modified nucleotide
  modified_base 6: mod_base = OTHER; note = 2'-O-methyl modified nucleotide
  modified_base 7: mod_base = OTHER; note = 2'-fluoro modified nucleotide
  modified_base 8: mod_base = OTHER; note = 2'-fluoro modified nucleotide
  modified_base 9: mod_base = OTHER; note = 2'-fluoro modified nucleotide
  modified_base 10: mod_base = OTHER; note = 2'-O-methyl modified nucleotide
  modified_base 11: mod_base = OTHER; note = 2'-O-methyl modified nucleotide
  modified_base 12: mod_base = OTHER; note = 2'-O-methyl modified nucleotide
  modified_base 13: mod_base = OTHER; note = 2'-O-methyl modified nucleotide
  modified_base 14: mod_base = OTHER; note = 2'-O-methyl modified nucleotide
  modified_base 15: mod_base = OTHER; note = 2'-O-methyl modified nucleotide
  modified_base 16: mod_base = OTHER; note = 2'-O-methyl modified nucleotide
  modified_base 17: mod_base = OTHER; note = 2'-O-methyl modified nucleotide
  modified_base 18: mod_base = OTHER; note = 2'-O-methyl modified nucleotide
  modified_base 19: mod_base = OTHER; note = 2'-O-methyl modified nucleotide
aagatcaaggctcacttaa

SEQ ID NO: 751 - RNA, 19 nt, synthetic construct
  source 1..19: mol_type = other RNA
  modified_base 1: mod_base = OTHER; note = 2'-O-methyl modified nucleotide with phosphorothioate linkage
  modified_base 2: mod_base = OTHER; note = 2'-O-methyl modified nucleotide with phosphorothioate linkage
  modified_base 3: mod_base = OTHER; note = 2'-O-methyl modified nucleotide
  modified_base 4: mod_base = OTHER; note = 2'-O-methyl modified nucleotide
  modified_base 5: mod_base = OTHER; note = 2'-fluoro modified nucleotide
  modified_base 6: mod_base = OTHER; note = 2'-O-methyl modified nucleotide
  modified_base 7: mod_base = OTHER; note = 2'-fluoro modified nucleotide
  modified_base 8: mod_base = OTHER; note = 2'-fluoro modified nucleotide
  modified_base 9: mod_base = OTHER; note = 2'-fluoro modified nucleotide
  modified_base 10: mod_base = OTHER; note = 2'-O-methyl modified nucleotide
  modified_base 11: mod_base = OTHER; note = 2'-O-methyl modified nucleotide
  modified_base 12: mod_base = OTHER; note = 2'-O-methyl modified nucleotide
  modified_base 13: mod_base = OTHER; note = 2'-O-methyl modified nucleotide
  modified_base 14: mod_base = OTHER; note = 2'-O-methyl modified nucleotide
  modified_base 15: mod_base = OTHER; note = 2'-O-methyl modified nucleotide
  modified_base 16: mod_base = OTHER; note = 2'-O-methyl modified nucleotide
  modified_base 17: mod_base = OTHER; note = 2'-O-methyl modified nucleotide
  modified_base 18: mod_base = OTHER; note = 2'-O-methyl modified nucleotide
  modified_base 19: mod_base = OTHER; note = 2'-O-methyl modified nucleotide
ttctgctgggttatgttca

SEQ ID NO: 752 - RNA, 19 nt, synthetic construct
  source 1..19: mol_type = other RNA
  modified_base 1: mod_base = OTHER; note = 2'-O-methyl modified nucleotide with phosphorothioate linkage
  modified_base 2: mod_base = OTHER; note = 2'-O-methyl modified nucleotide with phosphorothioate linkage
  modified_base 3: mod_base = OTHER; note = 2'-O-methyl modified nucleotide
  modified_base 4: mod_base = OTHER; note = 2'-O-methyl modified nucleotide
  modified_base 5: mod_base = OTHER; note = 2'-fluoro modified nucleotide
  modified_base 6: mod_base = OTHER; note = 2'-O-methyl modified nucleotide
  modified_base 7: mod_base = OTHER; note = 2'-fluoro modified nucleotide
  modified_base 8: mod_base = OTHER; note = 2'-fluoro modified nucleotide
  modified_base 9: mod_base = OTHER; note = 2'-fluoro modified nucleotide
  modified_base 10: mod_base = OTHER; note = 2'-O-methyl modified nucleotide
  modified_base 11: mod_base = OTHER; note = 2'-O-methyl modified nucleotide
  modified_base 12: mod_base = OTHER; note = 2'-O-methyl modified nucleotide
  modified_base 13: mod_base = OTHER; note = 2'-O-methyl modified nucleotide
  modified_base 14: mod_base = OTHER; note = 2'-O-methyl modified nucleotide
  modified_base 15: mod_base = OTHER; note = 2'-O-methyl modified nucleotide
  modified_base 16: mod_base = OTHER; note = 2'-O-methyl modified nucleotide
  modified_base 17: mod_base = OTHER; note = 2'-O-methyl modified nucleotide
  modified_base 18: mod_base = OTHER; note = 2'-O-methyl modified nucleotide
  modified_base 19: mod_base = OTHER; note = 2'-O-methyl modified nucleotide
gaacctcagcattgtgata

SEQ ID NO: 753 - RNA, 19 nt, synthetic construct
  source 1..19: mol_type = other RNA
  modified_base 1: mod_base = OTHER; note = 2'-O-methyl modified nucleotide with phosphorothioate linkage
  modified_base 2: mod_base = OTHER; note = 2'-O-methyl modified nucleotide with phosphorothioate linkage
  modified_base 3: mod_base = OTHER; note = 2'-O-methyl modified nucleotide
  modified_base 4: mod_base = OTHER; note = 2'-O-methyl modified nucleotide
  modified_base 5: mod_base = OTHER; note = 2'-fluoro modified nucleotide
  modified_base 6: mod_base = OTHER; note = 2'-O-methyl modified nucleotide
  modified_base 7: mod_base = OTHER; note = 2'-fluoro modified nucleotide
  modified_base 8: mod_base = OTHER; note = 2'-fluoro modified nucleotide
  modified_base 9: mod_base = OTHER; note = 2'-fluoro modified nucleotide
  modified_base 10: mod_base = OTHER; note = 2'-O-methyl modified nucleotide
  modified_base 11: mod_base = OTHER; note = 2'-O-methyl modified nucleotide
  modified_base 12: mod_base = OTHER; note = 2'-O-methyl modified nucleotide
  modified_base 13: mod_base = OTHER; note = 2'-O-methyl modified nucleotide
  modified_base 14: mod_base = OTHER; note = 2'-O-methyl modified nucleotide
  modified_base 15: mod_base = OTHER; note = 2'-O-methyl modified nucleotide
  modified_base 16: mod_base = OTHER; note = 2'-O-methyl modified nucleotide
  modified_base 17: mod_base = OTHER; note = 2'-O-methyl modified nucleotide
  modified_base 18: mod_base = OTHER; note = 2'-O-methyl modified nucleotide
  modified_base 19: mod_base = OTHER; note = 2'-O-methyl modified nucleotide
cacttatggaagcctaaaa

SEQ ID NO: 754 - RNA, 19 nt, synthetic construct
  source 1..19: mol_type = other RNA
  modified_base 1: mod_base = OTHER; note = 2'-O-methyl modified nucleotide with phosphorothioate linkage
  modified_base 2: mod_base = OTHER; note = 2'-O-methyl modified nucleotide with phosphorothioate linkage
  modified_base 3: mod_base = OTHER; note = 2'-O-methyl modified nucleotide
  modified_base 4: mod_base = OTHER; note = 2'-O-methyl modified nucleotide
  modified_base 5: mod_base = OTHER; note = 2'-fluoro modified nucleotide
  modified_base 6: mod_base = OTHER; note = 2'-O-methyl modified nucleotide
  modified_base 7: mod_base = OTHER; note = 2'-fluoro modified nucleotide
  modified_base 8: mod_base = OTHER; note = 2'-fluoro modified nucleotide
  modified_base 9: mod_base = OTHER; note = 2'-fluoro modified nucleotide
  modified_base 10: mod_base = OTHER; note = 2'-O-methyl modified nucleotide
  modified_base 11: mod_base = OTHER; note = 2'-O-methyl modified nucleotide
  modified_base 12: mod_base = OTHER; note = 2'-O-methyl modified nucleotide
  modified_base 13: mod_base = OTHER; note = 2'-O-methyl modified nucleotide
  modified_base 14: mod_base = OTHER; note = 2'-O-methyl modified nucleotide
  modified_base 15: mod_base = OTHER; note = 2'-O-methyl modified nucleotide
  modified_base 16: mod_base = OTHER; note = 2'-O-methyl modified nucleotide
  modified_base 17: mod_base = OTHER; note = 2'-O-methyl modified nucleotide
  modified_base 18: mod_base = OTHER; note = 2'-O-methyl modified nucleotide
  modified_base 19: mod_base = OTHER; note = 2'-O-methyl modified nucleotide
caatacatgcgctatgtca

SEQ ID NO: 755 - RNA, 19 nt, synthetic construct
  source 1..19: mol_type = other RNA
  modified_base 1: mod_base = OTHER; note = 2'-O-methyl modified nucleotide with phosphorothioate linkage
  modified_base 2: mod_base = OTHER; note = 2'-O-methyl modified nucleotide with phosphorothioate linkage
  modified_base 3: mod_base = OTHER; note = 2'-O-methyl modified nucleotide
  modified_base 4: mod_base = OTHER; note = 2'-O-methyl modified nucleotide
  modified_base 5: mod_base = OTHER; note = 2'-fluoro modified nucleotide
  modified_base 6: mod_base = OTHER; note = 2'-O-methyl modified nucleotide
  modified_base 7: mod_base = OTHER; note = 2'-fluoro modified nucleotide
  modified_base 8: mod_base = OTHER; note = 2'-fluoro modified nucleotide
  modified_base 9: mod_base = OTHER; note = 2'-fluoro modified nucleotide
  modified_base 10: mod_base = OTHER; note = 2'-O-methyl modified nucleotide
  modified_base 11: mod_base = OTHER; note = 2'-O-methyl modified nucleotide
  modified_base 12: mod_base = OTHER; note = 2'-O-methyl modified nucleotide
  modified_base 13: mod_base = OTHER; note = 2'-O-methyl modified nucleotide
  modified_base 14: mod_base = OTHER; note = 2'-O-methyl modified nucleotide
  modified_base 15: mod_base = OTHER; note = 2'-O-methyl modified nucleotide
  modified_base 16: mod_base = OTHER; note = 2'-O-methyl modified nucleotide
  modified_base 17: mod_base = OTHER; note = 2'-O-methyl modified nucleotide
  modified_base 18: mod_base = OTHER; note = 2'-O-methyl modified nucleotide
  modified_base 19: mod_base = OTHER; note = 2'-O-methyl modified nucleotide
cttcatcatgctctcgcta

SEQ ID NO: 756 - RNA, 19 nt, synthetic construct
  source 1..19: mol_type = other RNA
  modified_base 1: mod_base = OTHER; note = 2'-O-methyl modified nucleotide with phosphorothioate linkage
  modified_base 2: mod_base = OTHER; note = 2'-O-methyl modified nucleotide with phosphorothioate linkage
  modified_base 3: mod_base = OTHER; note = 2'-O-methyl modified nucleotide
  modified_base 4: mod_base = OTHER; note = 2'-O-methyl modified nucleotide
  modified_base 5: mod_base = OTHER; note = 2'-fluoro modified nucleotide
  modified_base 6: mod_base = OTHER; note = 2'-O-methyl modified nucleotide
  modified_base 7: mod_base = OTHER; note = 2'-fluoro modified nucleotide
  modified_base 8: mod_base = OTHER; note = 2'-fluoro modified nucleotide
  modified_base 9: mod_base = OTHER; note = 2'-fluoro modified nucleotide
  modified_base 10: mod_base = OTHER; note = 2'-O-methyl modified nucleotide
  modified_base 11: mod_base = OTHER; note = 2'-O-methyl modified nucleotide
  modified_base 12: mod_base = OTHER; note = 2'-O-methyl modified nucleotide
  modified_base 13: mod_base = OTHER; note = 2'-O-methyl modified nucleotide
  modified_base 14: mod_base = OTHER; note = 2'-O-methyl modified nucleotide
  modified_base 15: mod_base = OTHER; note = 2'-O-methyl modified nucleotide
  modified_base 16: mod_base = OTHER; note = 2'-O-methyl modified nucleotide
  modified_base 17: mod_base = OTHER; note = 2'-O-methyl modified nucleotide
  modified_base 18: mod_base = OTHER; note = 2'-O-methyl modified nucleotide
  modified_base 19: mod_base = OTHER; note = 2'-O-methyl modified nucleotide
atcatgctctcgctgggca

SEQ ID NO: 757 - RNA, 19 nt, synthetic construct
  source 1..19: mol_type = other RNA
  modified_base 1: mod_base = OTHER; note = 2'-O-methyl modified nucleotide with phosphorothioate linkage
  modified_base 2: mod_base = OTHER; note = 2'-O-methyl modified nucleotide with phosphorothioate linkage
  modified_base 3: mod_base = OTHER; note = 2'-O-methyl modified nucleotide
  modified_base 4: mod_base = OTHER; note = 2'-O-methyl modified nucleotide
  modified_base 5: mod_base = OTHER; note = 2'-fluoro modified nucleotide
  modified_base 6: mod_base = OTHER; note = 2'-O-methyl modified nucleotide
  modified_base 7: mod_base = OTHER; note = 2'-fluoro modified nucleotide
  modified_base 8: mod_base = OTHER; note = 2'-fluoro modified nucleotide
  modified_base 9: mod_base = OTHER; note = 2'-fluoro modified nucleotide
  modified_base 10: mod_base = OTHER; note = 2'-O-methyl modified nucleotide
  modified_base 11: mod_base = OTHER; note = 2'-O-methyl modified nucleotide
  modified_base 12: mod_base = OTHER; note = 2'-O-methyl modified nucleotide
  modified_base 13: mod_base = OTHER; note = 2'-O-methyl modified nucleotide
  modified_base 14: mod_base = OTHER; note = 2'-O-methyl modified nucleotide
  modified_base 15: mod_base = OTHER; note = 2'-O-methyl modified nucleotide
  modified_base 16: mod_base = OTHER; note = 2'-O-methyl modified nucleotide
  modified_base 17: mod_base = OTHER; note = 2'-O-methyl modified nucleotide
  modified_base 18: mod_base = OTHER; note = 2'-O-methyl modified nucleotide
  modified_base 19: mod_base = OTHER; note = 2'-O-methyl modified nucleotide
aaatcccattccaagttta

SEQ ID NO: 758 - RNA, 19 nt, synthetic construct
  source 1..19: mol_type = other RNA
  modified_base 1: mod_base = OTHER; note = 2'-O-methyl modified nucleotide with phosphorothioate linkage
  modified_base 2: mod_base = OTHER; note = 2'-O-methyl modified nucleotide with phosphorothioate linkage
  modified_base 3: mod_base = OTHER; note = 2'-O-methyl modified nucleotide
  modified_base 4: mod_base = OTHER; note = 2'-O-methyl modified nucleotide
  modified_base 5: mod_base = OTHER; note = 2'-fluoro modified nucleotide
  modified_base 6: mod_base = OTHER; note = 2'-O-methyl modified nucleotide
  modified_base 7: mod_base = OTHER; note = 2'-fluoro modified nucleotide
  modified_base 8: mod_base = OTHER; note = 2'-fluoro modified nucleotide
  modified_base 9: mod_base = OTHER; note = 2'-fluoro modified nucleotide
  modified_base 10: mod_base = OTHER; note = 2'-O-methyl modified nucleotide
  modified_base 11: mod_base = OTHER; note = 2'-O-methyl modified nucleotide
  modified_base 12: mod_base = OTHER; note = 2'-O-methyl modified nucleotide
  modified_base 13: mod_base = OTHER; note = 2'-O-methyl modified nucleotide
  modified_base 14: mod_base = OTHER; note = 2'-O-methyl modified nucleotide
  modified_base 15: mod_base = OTHER; note = 2'-O-methyl modified nucleotide
  modified_base 16: mod_base = OTHER; note = 2'-O-methyl modified nucleotide
  modified_base 17: mod_base = OTHER; note = 2'-O-methyl modified nucleotide
  modified_base 18: mod_base = OTHER; note = 2'-O-methyl modified nucleotide
  modified_base 19: mod_base = OTHER; note = 2'-O-methyl modified nucleotide
tctacatgattttccagca

SEQ ID NO: 759 - RNA, 19 nt, synthetic construct
  source 1..19: mol_type = other RNA
  modified_base 1: mod_base = OTHER; note = 2'-O-methyl modified nucleotide with phosphorothioate linkage
  modified_base 2: mod_base = OTHER; note = 2'-O-methyl modified nucleotide with phosphorothioate linkage
  modified_base 3: mod_base = OTHER; note = 2'-O-methyl modified nucleotide
  modified_base 4: mod_base = OTHER; note = 2'-O-methyl modified nucleotide
  modified_base 5: mod_base = OTHER; note = 2'-fluoro modified nucleotide
  modified_base 6: mod_base = OTHER; note = 2'-O-methyl modified nucleotide
  modified_base 7: mod_base = OTHER; note = 2'-fluoro modified nucleotide
  modified_base 8: mod_base = OTHER; note = 2'-fluoro modified nucleotide
  modified_base 9: mod_base = OTHER; note = 2'-fluoro modified nucleotide
  modified_base 10: mod_base = OTHER; note = 2'-O-methyl modified nucleotide
  modified_base 11: mod_base = OTHER; note = 2'-O-methyl modified nucleotide
  modified_base 12: mod_base = OTHER; note = 2'-O-methyl modified nucleotide
  modified_base 13: mod_base = OTHER; note = 2'-O-methyl modified nucleotide
  modified_base 14: mod_base = OTHER; note = 2'-O-methyl modified nucleotide
  modified_base 15: mod_base = OTHER; note = 2'-O-methyl modified nucleotide
  modified_base 16: mod_base = OTHER; note = 2'-O-methyl modified nucleotide
  modified_base 17: mod_base = OTHER; note = 2'-O-methyl modified nucleotide
  modified_base 18: mod_base = OTHER; note = 2'-O-methyl modified nucleotide
  modified_base 19: mod_base = OTHER; note = 2'-O-methyl modified nucleotide
tgctgggttatgttctcta

SEQ ID NO: 760 - RNA, 19 nt, synthetic construct
  source 1..19: mol_type = other RNA
  modified_base 1: mod_base = OTHER; note = 2'-O-methyl modified nucleotide with phosphorothioate linkage
  modified_base 2: mod_base = OTHER; note = 2'-O-methyl modified nucleotide with phosphorothioate linkage
  modified_base 3: mod_base = OTHER; note = 2'-O-methyl modified nucleotide
  modified_base 4: mod_base = OTHER; note = 2'-O-methyl modified nucleotide
  modified_base 5: mod_base = OTHER; note = 2'-fluoro modified nucleotide
  modified_base 6: mod_base = OTHER; note = 2'-O-methyl modified nucleotide
  modified_base 7: mod_base = OTHER; note = 2'-fluoro modified nucleotide
  modified_base 8: mod_base = OTHER; note = 2'-fluoro modified nucleotide
  modified_base 9: mod_base = OTHER; note = 2'-fluoro modified nucleotide
  modified_base 10: mod_base = OTHER; note = 2'-O-methyl modified nucleotide
  modified_base 11: mod_base = OTHER; note = 2'-O-methyl modified nucleotide
  modified_base 12: mod_base = OTHER; note = 2'-O-methyl modified nucleotide
  modified_base 13: mod_base = OTHER; note = 2'-O-methyl modified nucleotide
  modified_base 14: mod_base = OTHER; note = 2'-O-methyl modified nucleotide
  modified_base 15: mod_base = OTHER; note = 2'-O-methyl modified nucleotide
  modified_base 16: mod_base = OTHER; note = 2'-O-methyl modified nucleotide
  modified_base 17: mod_base = OTHER; note = 2'-O-methyl modified nucleotide
  modified_base 18: mod_base = OTHER; note = 2'-O-methyl modified nucleotide
  modified_base 19: mod_base = OTHER; note = 2'-O-methyl modified nucleotide
agggatcgtcctcaaatca

SEQ ID NO: 761 - RNA, 19 nt, synthetic construct
  source 1..19: mol_type = other RNA
  modified_base 1: mod_base = OTHER; note = 2'-O-methyl modified nucleotide with phosphorothioate linkage
  modified_base 2: mod_base = OTHER; note = 2'-O-methyl modified nucleotide with phosphorothioate linkage
  modified_base 3: mod_base = OTHER; note = 2'-O-methyl modified nucleotide
  modified_base 4: mod_base = OTHER; note = 2'-O-methyl modified nucleotide
  modified_base 5: mod_base = OTHER; note = 2'-fluoro modified nucleotide
  modified_base 6: mod_base = OTHER; note = 2'-O-methyl modified nucleotide
  modified_base 7: mod_base = OTHER; note = 2'-fluoro modified nucleotide
  modified_base 8: mod_base = OTHER; note = 2'-fluoro modified nucleotide
  modified_base 9: mod_base = OTHER; note = 2'-fluoro modified nucleotide
  modified_base 10: mod_base = OTHER; note = 2'-O-methyl modified nucleotide
  modified_base 11: mod_base = OTHER; note = 2'-O-methyl modified nucleotide
  modified_base 12: mod_base = OTHER; note = 2'-O-methyl modified nucleotide
  modified_base 13: mod_base = OTHER; note = 2'-O-methyl modified nucleotide
  modified_base 14: mod_base = OTHER; note = 2'-O-methyl modified nucleotide
  modified_base 15: mod_base = OTHER; note = 2'-O-methyl modified nucleotide
  modified_base 16: mod_base = OTHER; note = 2'-O-methyl modified nucleotide
  modified_base 17: mod_base = OTHER; note = 2'-O-methyl modified nucleotide
  modified_base 18: mod_base = OTHER; note = 2'-O-methyl modified nucleotide
  modified_base 19: mod_base = OTHER; note = 2'-O-methyl modified nucleotide
cagtatggcatcatgccca

SEQ ID NO: 762 - RNA, 19 nt, synthetic construct
  source 1..19: mol_type = other RNA
  modified_base 1: mod_base = OTHER; note = 2'-O-methyl modified nucleotide with phosphorothioate linkage
  modified_base 2: mod_base = OTHER; note = 2'-O-methyl modified nucleotide with phosphorothioate linkage
  modified_base 3: mod_base = OTHER; note = 2'-O-methyl modified nucleotide
  modified_base 4: mod_base = OTHER; note = 2'-O-methyl modified nucleotide
  modified_base 5: mod_base = OTHER; note = 2'-fluoro modified nucleotide
  modified_base 6: mod_base = OTHER; note = 2'-O-methyl modified nucleotide
  modified_base 7: mod_base = OTHER; note = 2'-fluoro modified nucleotide
  modified_base 8: mod_base = OTHER; note = 2'-fluoro modified nucleotide
  modified_base 9: mod_base = OTHER; note = 2'-fluoro modified nucleotide
  modified_base 10: mod_base = OTHER; note = 2'-O-methyl modified nucleotide
  modified_base 11: mod_base = OTHER; note = 2'-O-methyl modified nucleotide
  modified_base 12: mod_base = OTHER; note = 2'-O-methyl modified nucleotide
  modified_base 13: mod_base = OTHER; note = 2'-O-methyl modified nucleotide
  modified_base 14: mod_base = OTHER; note = 2'-O-methyl modified nucleotide
  modified_base 15: mod_base = OTHER; note = 2'-O-methyl modified nucleotide
  modified_base 16: mod_base = OTHER; note = 2'-O-methyl modified nucleotide
  modified_base 17: mod_base = OTHER; note = 2'-O-methyl modified nucleotide
  modified_base 18: mod_base = OTHER; note = 2'-O-methyl modified nucleotide
  modified_base 19: mod_base = OTHER; note = 2'-O-methyl modified nucleotide
ttcatcatgctctcgctga

SEQ ID NO: 763 - RNA, 19 nt, synthetic construct
  source 1..19: mol_type = other RNA
  modified_base 1: mod_base = OTHER; note = 2'-O-methyl modified nucleotide with phosphorothioate linkage
  modified_base 2: mod_base = OTHER; note = 2'-O-methyl modified nucleotide with phosphorothioate linkage
  modified_base 3: mod_base = OTHER; note = 2'-O-methyl modified nucleotide
  modified_base 4: mod_base = OTHER; note = 2'-O-methyl modified nucleotide
  modified_base 5: mod_base = OTHER; note = 2'-fluoro modified nucleotide
  modified_base 6: mod_base = OTHER; note = 2'-O-methyl modified nucleotide
  modified_base 7: mod_base = OTHER; note = 2'-fluoro modified nucleotide
  modified_base 8: mod_base = OTHER; note = 2'-fluoro modified nucleotide
  modified_base 9: mod_base = OTHER; note = 2'-fluoro modified nucleotide
  modified_base 10: mod_base = OTHER; note = 2'-O-methyl modified nucleotide
  modified_base 11: mod_base = OTHER; note = 2'-O-methyl modified nucleotide
  modified_base 12: mod_base = OTHER; note = 2'-O-methyl modified nucleotide
  modified_base 13: mod_base = OTHER; note = 2'-O-methyl modified nucleotide
  modified_base 14: mod_base = OTHER; note = 2'-O-methyl modified nucleotide
  modified_base 15: mod_base = OTHER; note = 2'-O-methyl modified nucleotide
  modified_base 16: mod_base = OTHER; note = 2'-O-methyl modified nucleotide
  modified_base 17: mod_base = OTHER; note = 2'-O-methyl modified nucleotide
  modified_base 18: mod_base = OTHER; note = 2'-O-methyl modified nucleotide
  modified_base 19: mod_base = OTHER; note = 2'-O-methyl modified nucleotide
ttctcattccttgcaccaa

SEQ ID NO: 764 - RNA, 19 nt, synthetic construct
  source 1..19: mol_type = other RNA
  modified_base 1: mod_base = OTHER; note = 2'-O-methyl modified nucleotide with phosphorothioate linkage
  modified_base 2: mod_base = OTHER; note = 2'-O-methyl modified nucleotide with phosphorothioate linkage
  modified_base 3: mod_base = OTHER; note = 2'-O-methyl modified nucleotide
  modified_base 4: mod_base = OTHER; note = 2'-O-methyl modified nucleotide
  modified_base 5: mod_base = OTHER; note = 2'-fluoro modified nucleotide
  modified_base 6: mod_base = OTHER; note = 2'-O-methyl modified nucleotide
  modified_base 7: mod_base = OTHER; note = 2'-fluoro modified nucleotide
  modified_base 8: mod_base = OTHER; note = 2'-fluoro modified nucleotide
  modified_base 9: mod_base = OTHER; note = 2'-fluoro modified nucleotide
  modified_base 10: mod_base = OTHER; note = 2'-O-methyl modified nucleotide
  modified_base 11: mod_base = OTHER; note = 2'-O-methyl modified nucleotide
  modified_base 12: mod_base = OTHER; note = 2'-O-methyl modified nucleotide
  modified_base 13: mod_base = OTHER; note = 2'-O-methyl modified nucleotide
  modified_base 14: mod_base = OTHER; note = 2'-O-methyl modified nucleotide
  modified_base 15: mod_base = OTHER; note = 2'-O-methyl modified nucleotide
  modified_base 16: mod_base = OTHER; note = 2'-O-methyl modified nucleotide
  modified_base 17: mod_base = OTHER; note = 2'-O-methyl modified nucleotide
  modified_base 18: mod_base = OTHER; note = 2'-O-methyl modified nucleotide
  modified_base 19: mod_base = OTHER; note = 2'-O-methyl modified nucleotide
ggctgcaccatggagttca

SEQ ID NO: 765 - RNA, 19 nt, synthetic construct
  source 1..19: mol_type = other RNA
  modified_base 1: mod_base = OTHER; note = 2'-O-methyl modified nucleotide with phosphorothioate linkage
  modified_base 2: mod_base = OTHER; note = 2'-O-methyl modified nucleotide with phosphorothioate linkage
  modified_base 3: mod_base = OTHER; note = 2'-O-methyl modified nucleotide
  modified_base 4: mod_base = OTHER; note = 2'-O-methyl modified nucleotide
  modified_base 5: mod_base = OTHER; note = 2'-fluoro modified nucleotide
  modified_base 6: mod_base = OTHER; note = 2'-O-methyl modified nucleotide
  modified_base 7: mod_base = OTHER; note = 2'-fluoro modified nucleotide
  modified_base 8: mod_base = OTHER; note = 2'-fluoro modified nucleotide
  modified_base 9: mod_base = OTHER; note = 2'-fluoro modified nucleotide
  modified_base 10: mod_base = OTHER; note = 2'-O-methyl modified nucleotide
  modified_base 11: mod_base = OTHER; note = 2'-O-methyl modified nucleotide
  modified_base 12: mod_base = OTHER; note = 2'-O-methyl modified nucleotide
  modified_base 13: mod_base = OTHER; note = 2'-O-methyl modified nucleotide
  modified_base 14: mod_base = OTHER; note = 2'-O-methyl modified nucleotide
  modified_base 15: mod_base = OTHER; note = 2'-O-methyl modified nucleotide
  modified_base 16: mod_base = OTHER; note = 2'-O-methyl modified nucleotide
  modified_base 17: mod_base = OTHER; note = 2'-O-methyl modified nucleotide
  modified_base 18: mod_base = OTHER; note = 2'-O-methyl modified nucleotide
  modified_base 19: mod_base = OTHER; note = 2'-O-methyl modified nucleotide
aactttggcaagcgcccca

SEQ ID NO: 766 - RNA, 19 nt, synthetic construct
  source 1..19: mol_type = other RNA
  modified_base 1: mod_base = OTHER; note = 2'-O-methyl modified nucleotide with phosphorothioate linkage
  modified_base 2: mod_base = OTHER; note = 2'-O-methyl modified nucleotide with phosphorothioate linkage
  modified_base 3: mod_base = OTHER; note = 2'-O-methyl modified nucleotide
  modified_base 4: mod_base = OTHER; note = 2'-O-methyl modified nucleotide
  modified_base 5: mod_base = OTHER; note = 2'-fluoro modified nucleotide
  modified_base 6: mod_base = OTHER; note = 2'-O-methyl modified nucleotide
  modified_base 7: mod_base = OTHER; note = 2'-fluoro modified nucleotide
  modified_base 8: mod_base = OTHER; note = 2'-fluoro modified nucleotide
  modified_base 9: mod_base = OTHER; note = 2'-fluoro modified nucleotide
  modified_base 10: mod_base = OTHER; note = 2'-O-methyl modified nucleotide
  modified_base 11: mod_base = OTHER; note = 2'-O-methyl modified nucleotide
  modified_base 12: mod_base = OTHER; note = 2'-O-methyl modified nucleotide
  modified_base 13: mod_base = OTHER; note = 2'-O-methyl modified nucleotide
  modified_base 14: mod_base = OTHER; note = 2'-O-methyl modified nucleotide
  modified_base 15: mod_base = OTHER; note = 2'-O-methyl modified nucleotide
  modified_base 16: mod_base = OTHER; note = 2'-O-methyl modified nucleotide
  modified_base 17: mod_base = OTHER; note = 2'-O-methyl modified nucleotide
  modified_base 18: mod_base = OTHER; note = 2'-O-methyl modified nucleotide
  modified_base 19: mod_base = OTHER; note = 2'-O-methyl modified nucleotide
agtcattggaccactttta

SEQ ID NO: 767 - RNA, 19 nt, synthetic construct
  source 1..19: mol_type = other RNA
  modified_base 1: mod_base = OTHER; note = 2'-O-methyl modified nucleotide with phosphorothioate linkage
  modified_base 2: mod_base = OTHER; note = 2'-O-methyl modified nucleotide with phosphorothioate linkage
  modified_base 3: mod_base = OTHER; note = 2'-O-methyl modified nucleotide
  modified_base 4: mod_base = OTHER; note = 2'-O-methyl modified nucleotide
  modified_base 5: mod_base = OTHER; note = 2'-fluoro modified nucleotide
  modified_base 6: mod_base = OTHER; note = 2'-O-methyl modified nucleotide
  modified_base 7: mod_base = OTHER; note = 2'-fluoro modified nucleotide
  modified_base 8: mod_base = OTHER; note = 2'-fluoro modified nucleotide
  modified_base 9: mod_base = OTHER; note = 2'-fluoro modified nucleotide
  modified_base 10: mod_base = OTHER; note = 2'-O-methyl modified nucleotide
  modified_base 11: mod_base = OTHER; note = 2'-O-methyl modified nucleotide
  modified_base 12: mod_base = OTHER; note = 2'-O-methyl modified nucleotide
  modified_base 13: mod_base = OTHER; note = 2'-O-methyl modified nucleotide
  modified_base 14: mod_base = OTHER; note = 2'-O-methyl modified nucleotide
  modified_base 15: mod_base = OTHER; note = 2'-O-methyl modified nucleotide
  modified_base 16: mod_base = OTHER; note = 2'-O-methyl modified nucleotide
  modified_base 17: mod_base = OTHER; note = 2'-O-methyl modified nucleotide
  modified_base 18: mod_base = OTHER; note = 2'-O-methyl modified nucleotide
  modified_base 19: mod_base = OTHER; note = 2'-O-methyl modified nucleotide
tggtggcacagtatggcaa

SEQ ID NO: 768 - RNA, 19 nt, synthetic construct
  source 1..19: mol_type = other RNA
  modified_base 1: mod_base = OTHER; note = 2'-O-methyl modified nucleotide with phosphorothioate linkage
  modified_base 2: mod_base = OTHER; note = 2'-O-methyl modified nucleotide with phosphorothioate linkage
  modified_base 3: mod_base = OTHER; note = 2'-O-methyl modified nucleotide
  modified_base 4: mod_base = OTHER; note = 2'-O-methyl modified nucleotide
  modified_base 5: mod_base = OTHER; note = 2'-fluoro modified nucleotide
  modified_base 6: mod_base = OTHER; note = 2'-O-methyl modified nucleotide
  modified_base 7: mod_base = OTHER; note = 2'-fluoro modified nucleotide
  modified_base 8: mod_base = OTHER; note = 2'-fluoro modified nucleotide
  modified_base 9: mod_base = OTHER; note = 2'-fluoro modified nucleotide
  modified_base 10: mod_base = OTHER; note = 2'-O-methyl modified nucleotide
  modified_base 11: mod_base = OTHER; note = 2'-O-methyl modified nucleotide
  modified_base 12: mod_base = OTHER; note = 2'-O-methyl modified nucleotide
  modified_base 13: mod_base = OTHER; note = 2'-O-methyl modified nucleotide
  modified_base 14: mod_base = OTHER; note = 2'-O-methyl modified nucleotide
  modified_base 15: mod_base = OTHER; note = 2'-O-methyl modified nucleotide
  modified_base 16: mod_base = OTHER; note = 2'-O-methyl modified nucleotide
  modified_base 17: mod_base = OTHER; note = 2'-O-methyl modified nucleotide
  modified_base 18: mod_base = OTHER; note = 2'-O-methyl modified nucleotide
  modified_base 19: mod_base = OTHER; note = 2'-O-methyl modified nucleotide
agggagggatgatcatcaa

SEQ ID NO: 769 - RNA, 19 nt, synthetic construct
  source 1..19: mol_type = other RNA
  modified_base 1: mod_base = OTHER; note = 2'-O-methyl modified nucleotide with phosphorothioate linkage
  modified_base 2: mod_base = OTHER; note = 2'-O-methyl modified nucleotide with phosphorothioate linkage
  modified_base 3: mod_base = OTHER; note = 2'-O-methyl modified nucleotide
  modified_base 4: mod_base = OTHER; note = 2'-O-methyl modified nucleotide
  modified_base 5: mod_base = OTHER; note = 2'-fluoro modified nucleotide
  modified_base 6: mod_base = OTHER; note = 2'-O-methyl modified nucleotide
  modified_base 7: mod_base = OTHER; note = 2'-fluoro modified nucleotide
  modified_base 8: mod_base = OTHER; note = 2'-fluoro modified nucleotide
  modified_base 9: mod_base = OTHER; note = 2'-fluoro modified nucleotide
  modified_base 10: mod_base = OTHER; note = 2'-O-methyl modified nucleotide
  modified_base 11: mod_base = OTHER; note = 2'-O-methyl modified nucleotide
  modified_base 12: mod_base = OTHER; note = 2'-O-methyl modified nucleotide
  modified_base 13: mod_base = OTHER; note = 2'-O-methyl modified nucleotide
  modified_base 14: mod_base = OTHER; note = 2'-O-methyl modified nucleotide
  modified_base 15: mod_base = OTHER; note = 2'-O-methyl modified nucleotide
  modified_base 16: mod_base = OTHER; note = 2'-O-methyl modified nucleotide
  modified_base 17: mod_base = OTHER; note = 2'-O-methyl modified nucleotide
  modified_base 18: mod_base = OTHER; note = 2'-O-methyl modified nucleotide
  modified_base 19: mod_base = OTHER; note = 2'-O-methyl modified nucleotide
cctgaagtcattggaccaa

SEQ ID NO: 770 - RNA, 19 nt, synthetic construct
  source 1..19: mol_type = other RNA
  modified_base 1: mod_base = OTHER; note = 2'-O-methyl modified nucleotide with phosphorothioate linkage
  modified_base 2: mod_base = OTHER; note = 2'-O-methyl modified nucleotide with phosphorothioate linkage
  modified_base 3: mod_base = OTHER; note = 2'-O-methyl modified nucleotide
  modified_base 4: mod_base = OTHER; note = 2'-O-methyl modified nucleotide
  modified_base 5: mod_base = OTHER; note = 2'-fluoro modified nucleotide
  modified_base 6: mod_base = OTHER; note = 2'-O-methyl modified nucleotide
  modified_base 7: mod_base = OTHER; note = 2'-fluoro modified nucleotide
  modified_base 8: mod_base = OTHER; note = 2'-fluoro modified nucleotide
  modified_base 9: mod_base = OTHER; note = 2'-fluoro modified nucleotide
  modified_base 10: mod_base = OTHER; note = 2'-O-methyl modified nucleotide
  modified_base 11: mod_base = OTHER; note = 2'-O-methyl modified nucleotide
  modified_base 12: mod_base = OTHER; note = 2'-O-methyl modified nucleotide
  modified_base 13: mod_base = OTHER; note = 2'-O-methyl modified nucleotide
  modified_base 14: mod_base = OTHER; note = 2'-O-methyl modified nucleotide
  modified_base 15: mod_base = OTHER; note = 2'-O-methyl modified nucleotide
  modified_base 16: mod_base = OTHER; note = 2'-O-methyl modified nucleotide
  modified_base 17: mod_base = OTHER; note = 2'-O-methyl modified nucleotide
  modified_base 18: mod_base = OTHER; note = 2'-O-methyl modified nucleotide
  modified_base 19: mod_base = OTHER; note = 2'-O-methyl modified nucleotide
actcaattcctgaactaaa

SEQ ID NO: 771 - RNA, 19 nt, synthetic construct
  source 1..19: mol_type = other RNA
  modified_base 1: mod_base = OTHER; note = 2'-O-methyl modified nucleotide with phosphorothioate linkage
  modified_base 2: mod_base = OTHER; note = 2'-O-methyl modified nucleotide with phosphorothioate linkage
  modified_base 3: mod_base = OTHER; note = 2'-O-methyl modified nucleotide
  modified_base 4: mod_base = OTHER; note = 2'-O-methyl modified nucleotide
  modified_base 5: mod_base = OTHER; note = 2'-fluoro modified nucleotide
  modified_base 6: mod_base = OTHER; note = 2'-O-methyl modified nucleotide
  modified_base 7: mod_base = OTHER; note = 2'-fluoro modified nucleotide
  modified_base 8: mod_base = OTHER; note = 2'-fluoro modified nucleotide
  modified_base 9: mod_base = OTHER; note = 2'-fluoro modified nucleotide
  modified_base 10: mod_base = OTHER; note = 2'-O-methyl modified nucleotide
  modified_base 11: mod_base = OTHER; note = 2'-O-methyl modified nucleotide
  modified_base 12: mod_base = OTHER; note = 2'-O-methyl modified nucleotide
  modified_base 13: mod_base = OTHER; note = 2'-O-methyl modified nucleotide
  modified_base 14: mod_base = OTHER; note = 2'-O-methyl modified nucleotide
  modified_base 15: mod_base = OTHER; note = 2'-O-methyl modified nucleotide
  modified_base 16: mod_base = OTHER; note = 2'-O-methyl modified nucleotide
  modified_base 17: mod_base = OTHER; note = 2'-O-methyl modified nucleotide
  modified_base 18: mod_base = OTHER; note = 2'-O-methyl modified nucleotide
  modified_base 19: mod_base = OTHER; note = 2'-O-methyl modified nucleotide
gcccttggcatgatgccta

SEQ ID NO: 772 - RNA, 19 nt, synthetic construct
  source 1..19: mol_type = other RNA
  modified_base 1: mod_base = OTHER; note = 2'-O-methyl modified nucleotide with phosphorothioate linkage
  modified_base 2: mod_base = OTHER; note = 2'-O-methyl modified nucleotide with phosphorothioate linkage
  modified_base 3: mod_base = OTHER; note = 2'-O-methyl modified nucleotide
  modified_base 4: mod_base = OTHER; note = 2'-O-methyl modified nucleotide
  modified_base 5: mod_base = OTHER; note = 2'-fluoro modified nucleotide
  modified_base 6: mod_base = OTHER; note = 2'-O-methyl modified nucleotide
  modified_base 7: mod_base = OTHER; note = 2'-fluoro modified nucleotide
  modified_base 8: mod_base = OTHER; note = 2'-fluoro modified nucleotide
  modified_base 9: mod_base = OTHER; note = 2'-fluoro modified nucleotide
  modified_base 10: mod_base = OTHER; note = 2'-O-methyl modified nucleotide
  modified_base 11: mod_base = OTHER; note = 2'-O-methyl modified nucleotide
  modified_base 12: mod_base = OTHER; note = 2'-O-methyl modified nucleotide
  modified_base 13: mod_base = OTHER; note = 2'-O-methyl modified nucleotide
  modified_base 14: mod_base = OTHER; note = 2'-O-methyl modified nucleotide
  modified_base 15: mod_base = OTHER; note = 2'-O-methyl modified nucleotide
  modified_base 16: mod_base = OTHER; note = 2'-O-methyl modified nucleotide
  modified_base 17: mod_base = OTHER; note = 2'-O-methyl modified nucleotide
  modified_base 18: mod_base = OTHER; note = 2'-O-methyl modified nucleotide
  modified_base 19: mod_base = OTHER; note = 2'-O-methyl modified nucleotide
catgctctcgctgggctga

SEQ ID NO: 773 - RNA, 19 nt, synthetic construct
  source 1..19: mol_type = other RNA
  modified_base 1: mod_base = OTHER; note = 2'-O-methyl modified nucleotide with phosphorothioate linkage
  modified_base 2: mod_base = OTHER; note = 2'-O-methyl modified nucleotide with phosphorothioate linkage
  modified_base 3: mod_base = OTHER; note = 2'-O-methyl modified nucleotide
  modified_base 4: mod_base = OTHER; note = 2'-O-methyl modified nucleotide
  modified_base 5: mod_base = OTHER; note = 2'-fluoro modified nucleotide
  modified_base 6: mod_base = OTHER; note = 2'-O-methyl modified nucleotide
  modified_base 7: mod_base = OTHER; note = 2'-fluoro modified nucleotide
  modified_base 8: mod_base = OTHER; note = 2'-fluoro modified nucleotide
  modified_base 9: mod_base = OTHER; note = 2'-fluoro modified nucleotide
  modified_base 10: mod_base = OTHER; note = 2'-O-methyl modified nucleotide
  modified_base 11: mod_base = OTHER; note = 2'-O-methyl modified nucleotide
  modified_base 12: mod_base = OTHER; note = 2'-O-methyl modified nucleotide
  modified_base 13: mod_base = OTHER; note = 2'-O-methyl modified nucleotide
  modified_base 14: mod_base = OTHER; note = 2'-O-methyl modified nucleotide
  modified_base 15: mod_base = OTHER; note = 2'-O-methyl modified nucleotide
  modified_base 16: mod_base = OTHER; note = 2'-O-methyl modified nucleotide
  modified_base 17: mod_base = OTHER; note = 2'-O-methyl modified nucleotide
  modified_base 18: mod_base = OTHER; note = 2'-O-methyl modified nucleotide
  modified_base 19: mod_base = OTHER; note = 2'-O-methyl modified nucleotide
atagggatcgtcctcaaaa

SEQ ID NO: 774 - RNA, 19 nt, synthetic construct
  source 1..19: mol_type = other RNA
  modified_base 1: mod_base = OTHER; note = 2'-O-methyl modified nucleotide with phosphorothioate linkage
  modified_base 2: mod_base = OTHER; note = 2'-O-methyl modified nucleotide with phosphorothioate linkage
  modified_base 3: mod_base = OTHER; note = 2'-O-methyl modified nucleotide
  modified_base 4: mod_base = OTHER; note = 2'-O-methyl modified nucleotide
  modified_base 5: mod_base = OTHER; note = 2'-fluoro modified nucleotide
  modified_base 6: mod_base = OTHER; note = 2'-O-methyl modified nucleotide
  modified_base 7: mod_base = OTHER; note = 2'-fluoro modified nucleotide
  modified_base 8: mod_base = OTHER; note = 2'-fluoro modified nucleotide
  modified_base 9: mod_base = OTHER; note = 2'-fluoro modified nucleotide
  modified_base 10: mod_base = OTHER; note = 2'-O-methyl modified nucleotide
  modified_base 11: mod_base = OTHER; note = 2'-O-methyl modified nucleotide
  modified_base 12: mod_base = OTHER; note = 2'-O-methyl modified nucleotide
  modified_base 13: mod_base = OTHER; note = 2'-O-methyl modified nucleotide
  modified_base 14: mod_base = OTHER; note = 2'-O-methyl modified nucleotide
  modified_base 15: mod_base = OTHER; note = 2'-O-methyl modified nucleotide
  modified_base 16: mod_base = OTHER; note = 2'-O-methyl modified nucleotide
  modified_base 17: mod_base = OTHER; note = 2'-O-methyl modified nucleotide
  modified_base 18: mod_base = OTHER; note = 2'-O-methyl modified nucleotide
  modified_base 19: mod_base = OTHER; note = 2'-O-methyl modified nucleotide
tcatgtttgccatgacaca

SEQ ID NO: 775 - RNA, 19 nt, synthetic construct
  source 1..19: mol_type = other RNA
  modified_base 1: mod_base = OTHER; note = 2'-O-methyl modified nucleotide with phosphorothioate linkage
  modified_base 2: mod_base = OTHER; note = 2'-O-methyl modified nucleotide with phosphorothioate linkage
  modified_base 3: mod_base = OTHER; note = 2'-O-methyl modified nucleotide
  modified_base 4: mod_base = OTHER; note = 2'-O-methyl modified nucleotide
  modified_base 5: mod_base = OTHER; note = 2'-fluoro modified nucleotide
  modified_base 6: mod_base = OTHER; note = 2'-O-methyl modified nucleotide
  modified_base 7: mod_base = OTHER; note = 2'-fluoro modified nucleotide
  modified_base 8: mod_base = OTHER; note = 2'-fluoro modified nucleotide
  modified_base 9: mod_base = OTHER; note = 2'-fluoro modified nucleotide
  modified_base 10: mod_base = OTHER; note = 2'-O-methyl modified nucleotide
  modified_base 11: mod_base = OTHER; note = 2'-O-methyl modified nucleotide
  modified_base 12: mod_base = OTHER; note = 2'-O-methyl modified nucleotide
  modified_base 13: mod_base = OTHER; note = 2'-O-methyl modified nucleotide
  modified_base 14: mod_base = OTHER; note = 2'-O-methyl modified nucleotide
  modified_base 15: mod_base = OTHER; note = 2'-O-methyl modified nucleotide
  modified_base 16: mod_base = OTHER; note = 2'-O-methyl modified nucleotide
  modified_base 17: mod_base = OTHER; note = 2'-O-methyl modified nucleotide
  modified_base 18: mod_base = OTHER; note = 2'-O-methyl modified nucleotide
  modified_base 19: mod_base = OTHER; note = 2'-O-methyl modified nucleotide
acagtatggcatcatgcca

SEQ ID NO: 776 - RNA, 19 nt, synthetic construct
  source 1..19: mol_type = other RNA
  modified_base 1: mod_base = OTHER; note = 2'-O-methyl modified nucleotide with phosphorothioate linkage
  modified_base 2: mod_base = OTHER; note = 2'-O-methyl modified nucleotide with phosphorothioate linkage
  modified_base 3: mod_base = OTHER; note = 2'-O-methyl modified nucleotide
  modified_base 4: mod_base = OTHER; note = 2'-O-methyl modified nucleotide
  modified_base 5: mod_base = OTHER; note = 2'-fluoro modified nucleotide
  modified_base 6: mod_base = OTHER; note = 2'-O-methyl modified nucleotide
  modified_base 7: mod_base = OTHER; note = 2'-fluoro modified nucleotide
  modified_base 8: mod_base = OTHER; note = 2'-fluoro modified nucleotide
  modified_base 9: mod_base = OTHER; note = 2'-fluoro modified nucleotide
  modified_base 10: mod_base = OTHER; note = 2'-O-methyl modified nucleotide
  modified_base 11: mod_base = OTHER; note = 2'-O-methyl modified nucleotide
  modified_base 12: mod_base = OTHER; note = 2'-O-methyl modified nucleotide
  modified_base 13: mod_base = OTHER; note = 2'-O-methyl modified nucleotide
  modified_base 14: mod_base = OTHER; note = 2'-O-methyl modified nucleotide
  modified_base 15: mod_base = OTHER; note = 2'-O-methyl modified nucleotide
  modified_base 16: mod_base = OTHER; note = 2'-O-methyl modified nucleotide
  modified_base 17: mod_base = OTHER; note = 2'-O-methyl modified nucleotide
  modified_base 18: mod_base = OTHER; note = 2'-O-methyl modified nucleotide
  modified_base 19: mod_base = OTHER; note = 2'-O-methyl modified nucleotide
tcactcaattcctgaacta

SEQ ID NO: 777 - RNA, 19 nt, synthetic construct
  source 1..19: mol_type = other RNA
  modified_base 1: mod_base = OTHER; note = 2'-O-methyl modified nucleotide with phosphorothioate linkage
  modified_base 2: mod_base = OTHER; note = 2'-O-methyl modified nucleotide with phosphorothioate linkage
  modified_base 3: mod_base = OTHER; note = 2'-O-methyl modified nucleotide
  modified_base 4: mod_base = OTHER; note = 2'-O-methyl modified nucleotide
  modified_base 5: mod_base = OTHER; note = 2'-fluoro modified nucleotide
  modified_base 6: mod_base = OTHER; note = 2'-O-methyl modified nucleotide
  modified_base 7: mod_base = OTHER; note = 2'-fluoro modified nucleotide
  modified_base 8: mod_base = OTHER; note = 2'-fluoro modified nucleotide
  modified_base 9: mod_base = OTHER; note = 2'-fluoro modified nucleotide
  modified_base 10: mod_base = OTHER; note = 2'-O-methyl modified nucleotide
  modified_base 11: mod_base = OTHER; note = 2'-O-methyl modified nucleotide
  modified_base 12: mod_base = OTHER; note = 2'-O-methyl modified nucleotide
  modified_base 13: mod_base = OTHER; note = 2'-O-methyl modified nucleotide
  modified_base 14: mod_base = OTHER; note = 2'-O-methyl modified nucleotide
  modified_base 15: mod_base = OTHER; note = 2'-O-methyl modified nucleotide
  modified_base 16: mod_base = OTHER; note = 2'-O-methyl modified nucleotide
  modified_base 17: mod_base = OTHER; note = 2'-O-methyl modified nucleotide
  modified_base 18: mod_base = OTHER; note = 2'-O-methyl modified nucleotide
  modified_base 19: mod_base = OTHER; note = 2'-O-methyl modified nucleotide
tcctcaaatccaaacggca

SEQ ID NO: 778 - RNA, 19 nt, synthetic construct
  source 1..19: mol_type = other RNA
  modified_base 1: mod_base = OTHER; note = 2'-O-methyl modified nucleotide with phosphorothioate linkage
  modified_base 2: mod_base = OTHER; note = 2'-O-methyl modified nucleotide with phosphorothioate linkage
  modified_base 3: mod_base = OTHER; note = 2'-O-methyl modified nucleotide
  modified_base 4: mod_base = OTHER; note = 2'-O-methyl modified nucleotide
  modified_base 5: mod_base = OTHER; note = 2'-fluoro modified nucleotide
  modified_base 6: mod_base = OTHER; note = 2'-O-methyl modified nucleotide
  modified_base 7: mod_base = OTHER; note = 2'-fluoro modified nucleotide
  modified_base 8: mod_base = OTHER; note = 2'-fluoro modified nucleotide
  modified_base 9: mod_base = OTHER; note = 2'-fluoro modified nucleotide
  modified_base 10: mod_base = OTHER; note = 2'-O-methyl modified nucleotide
  modified_base 11: mod_base = OTHER; note = 2'-O-methyl modified nucleotide
  modified_base 12: mod_base = OTHER; note = 2'-O-methyl modified nucleotide
  modified_base 13: mod_base = OTHER; note = 2'-O-methyl modified nucleotide
  modified_base 14: mod_base = OTHER; note = 2'-O-methyl modified nucleotide
  modified_base 15: mod_base = OTHER; note = 2'-O-methyl modified nucleotide
  modified_base 16: mod_base = OTHER; note = 2'-O-methyl modified nucleotide
  modified_base 17: mod_base = OTHER; note = 2'-O-methyl modified nucleotide
  modified_base 18: mod_base = OTHER; note = 2'-O-methyl modified nucleotide
  modified_base 19: mod_base = OTHER; note = 2'-O-methyl modified nucleotide
ggccacaatacatgcgcta

SEQ ID NO: 779 - RNA, 19 nt, synthetic construct
  source 1..19: mol_type = other RNA
  modified_base 1: mod_base = OTHER; note = 2'-O-methyl modified nucleotide with phosphorothioate linkage
  modified_base 2: mod_base = OTHER; note = 2'-O-methyl modified nucleotide with phosphorothioate linkage
  modified_base 3: mod_base = OTHER; note = 2'-O-methyl modified nucleotide
  modified_base 4: mod_base = OTHER; note = 2'-O-methyl modified nucleotide
  modified_base 5: mod_base = OTHER; note = 2'-fluoro modified nucleotide
  modified_base 6: mod_base = OTHER; note = 2'-O-methyl modified nucleotide
  modified_base 7: mod_base = OTHER; note = 2'-fluoro modified nucleotide
  modified_base 8: mod_base = OTHER; note = 2'-fluoro modified nucleotide
  modified_base 9: mod_base = OTHER; note = 2'-fluoro modified nucleotide
  modified_base 10: mod_base = OTHER; note = 2'-O-methyl modified nucleotide
  modified_base 11: mod_base = OTHER; note = 2'-O-methyl modified nucleotide
  modified_base 12: mod_base = OTHER; note = 2'-O-methyl modified nucleotide
  modified_base 13: mod_base = OTHER; note = 2'-O-methyl modified nucleotide
  modified_base 14: mod_base = OTHER; note = 2'-O-methyl modified nucleotide
  modified_base 15: mod_base = OTHER; note = 2'-O-methyl modified nucleotide
  modified_base 16: mod_base = OTHER; note = 2'-O-methyl modified nucleotide
  modified_base 17: mod_base = OTHER; note = 2'-O-methyl modified nucleotide
  modified_base 18: mod_base = OTHER; note = 2'-O-methyl modified nucleotide
  modified_base 19: mod_base = OTHER; note = 2'-O-methyl modified nucleotide
gcagtgtggccgtcacaga

SEQ ID NO: 780 - RNA, 19 nt, synthetic construct
  source 1..19: mol_type = other RNA
  modified_base 1: mod_base = OTHER; note = 2'-O-methyl modified nucleotide with phosphorothioate linkage
  modified_base 2: mod_base = OTHER; note = 2'-O-methyl modified nucleotide with phosphorothioate linkage
  modified_base 3: mod_base = OTHER; note = 2'-O-methyl modified nucleotide
  modified_base 4: mod_base = OTHER; note = 2'-O-methyl modified nucleotide
  modified_base 5: mod_base = OTHER; note = 2'-fluoro modified nucleotide
  modified_base 6: mod_base = OTHER; note = 2'-O-methyl modified nucleotide
  modified_base 7: mod_base = OTHER; note = 2'-fluoro modified nucleotide
  modified_base 8: mod_base = OTHER; note = 2'-fluoro modified nucleotide
  modified_base 9: mod_base = OTHER; note = 2'-fluoro modified nucleotide
  modified_base 10: mod_base = OTHER; note = 2'-O-methyl modified nucleotide
  modified_base 11: mod_base = OTHER; note = 2'-O-methyl modified nucleotide
  modified_base 12: mod_base = OTHER; note = 2'-O-methyl modified nucleotide
  modified_base 13: mod_base = OTHER; note = 2'-O-methyl modified nucleotide
  modified_base 14: mod_base = OTHER; note = 2'-O-methyl modified nucleotide
  modified_base 15: mod_base = OTHER; note = 2'-O-methyl modified nucleotide
  modified_base 16: mod_base = OTHER; note = 2'-O-methyl modified nucleotide
  modified_base 17: mod_base = OTHER; note = 2'-O-methyl modified nucleotide
  modified_base 18: mod_base = OTHER; note = 2'-O-methyl modified nucleotide
  modified_base 19: mod_base = OTHER; note = 2'-O-methyl modified nucleotide
ccttgcaccatagggatca

SEQ ID NO: 781 - RNA, 19 nt, synthetic construct
  source 1..19: mol_type = other RNA
  modified_base 1: mod_base = OTHER; note = 2'-O-methyl modified nucleotide with phosphorothioate linkage
  modified_base 2: mod_base = OTHER; note = 2'-O-methyl modified nucleotide with phosphorothioate linkage
  modified_base 3: mod_base = OTHER; note = 2'-O-methyl modified nucleotide
  modified_base 4: mod_base = OTHER; note = 2'-O-methyl modified nucleotide
  modified_base 5: mod_base = OTHER; note = 2'-fluoro modified nucleotide
  modified_base 6: mod_base = OTHER; note = 2'-O-methyl modified nucleotide
  modified_base 7: mod_base = OTHER; note = 2'-fluoro modified nucleotide
  modified_base 8: mod_base = OTHER; note = 2'-fluoro modified nucleotide
  modified_base 9: mod_base = OTHER; note = 2'-fluoro modified nucleotide
  modified_base 10: mod_base = OTHER; note = 2'-O-methyl modified nucleotide
  modified_base 11: mod_base = OTHER; note = 2'-O-methyl modified nucleotide
  modified_base 12: mod_base = OTHER; note = 2'-O-methyl modified nucleotide
  modified_base 13: mod_base = OTHER; note = 2'-O-methyl modified nucleotide
  modified_base 14: mod_base = OTHER; note = 2'-O-methyl modified nucleotide
  modified_base 15: mod_base = OTHER; note = 2'-O-methyl modified nucleotide
  modified_base 16: mod_base = OTHER; note = 2'-O-methyl modified nucleotide
  modified_base 17: mod_base = OTHER; note = 2'-O-methyl modified nucleotide
  modified_base 18: mod_base = OTHER; note = 2'-O-methyl modified nucleotide
  modified_base 19: mod_base = OTHER; note = 2'-O-methyl modified nucleotide
acaaggtgccctataaaga

SEQ ID NO: 782 - RNA, 19 nt, synthetic construct
  source 1..19: mol_type = other RNA
  modified_base 1: mod_base = OTHER; note = 2'-O-methyl modified nucleotide with phosphorothioate linkage
  modified_base 2: mod_base = OTHER; note = 2'-O-methyl modified nucleotide with phosphorothioate linkage
  modified_base 3: mod_base = OTHER; note = 2'-O-methyl modified nucleotide
  modified_base 4: mod_base = OTHER; note = 2'-O-methyl modified nucleotide
  modified_base 5: mod_base = OTHER; note = 2'-fluoro modified nucleotide
  modified_base 6: mod_base = OTHER; note = 2'-O-methyl modified nucleotide
  modified_base 7: mod_base = OTHER; note = 2'-fluoro modified nucleotide
  modified_base 8: mod_base = OTHER; note = 2'-fluoro modified nucleotide
  modified_base 9: mod_base = OTHER; note = 2'-fluoro modified nucleotide
  modified_base 10: mod_base = OTHER; note = 2'-O-methyl modified nucleotide
  modified_base 11: mod_base = OTHER; note = 2'-O-methyl modified nucleotide
  modified_base 12: mod_base = OTHER; note = 2'-O-methyl modified nucleotide
  modified_base 13: mod_base = OTHER; note = 2'-O-methyl modified nucleotide
  modified_base 14: mod_base = OTHER; note = 2'-O-methyl modified nucleotide
  modified_base 15: mod_base = OTHER; note = 2'-O-methyl modified nucleotide
  modified_base 16: mod_base = OTHER; note = 2'-O-methyl modified nucleotide
  modified_base 17: mod_base = OTHER; note = 2'-O-methyl modified nucleotide
  modified_base 18: mod_base = OTHER; note = 2'-O-methyl modified nucleotide
  modified_base 19: mod_base = OTHER; note = 2'-O-methyl modified nucleotide
cattccttgcaccatagga

SEQ ID NO: 783 - RNA, 19 nt, synthetic construct
  source 1..19: mol_type = other RNA
  modified_base 1: mod_base = OTHER; note = 2'-O-methyl modified nucleotide with phosphorothioate linkage
  modified_base 2: mod_base = OTHER; note = 2'-O-methyl modified nucleotide with phosphorothioate linkage
  modified_base 3: mod_base = OTHER; note = 2'-O-methyl modified nucleotide
  modified_base 4: mod_base = OTHER; note = 2'-O-methyl modified nucleotide
  modified_base 5: mod_base = OTHER; note = 2'-fluoro modified nucleotide
  modified_base 6: mod_base = OTHER; note = 2'-O-methyl modified nucleotide
  modified_base 7: mod_base = OTHER; note = 2'-fluoro modified nucleotide
  modified_base 8: mod_base = OTHER; note = 2'-fluoro modified nucleotide
  modified_base 9: mod_base = OTHER; note = 2'-fluoro modified nucleotide
  modified_base 10: mod_base = OTHER; note = 2'-O-methyl modified nucleotide
  modified_base 11: mod_base = OTHER; note = 2'-O-methyl modified nucleotide
  modified_base 12: mod_base = OTHER; note = 2'-O-methyl modified nucleotide
  modified_base 13: mod_base = OTHER; note = 2'-O-methyl modified nucleotide
  modified_base 14: mod_base = OTHER; note = 2'-O-methyl modified nucleotide
  modified_base 15: mod_base = OTHER; note = 2'-O-methyl modified nucleotide
  modified_base 16: mod_base = OTHER; note = 2'-O-methyl modified nucleotide
  modified_base 17: mod_base = OTHER; note = 2'-O-methyl modified nucleotide
  modified_base 18: mod_base = OTHER; note = 2'-O-methyl modified nucleotide
  modified_base 19: mod_base = OTHER; note = 2'-O-methyl modified nucleotide
gatcaaggctcacttatga

SEQ ID NO: 784 - RNA, 19 nt, synthetic construct
  source 1..19: mol_type = other RNA
  modified_base 1: mod_base = OTHER; note = 2'-O-methyl modified nucleotide with phosphorothioate linkage
  modified_base 2: mod_base = OTHER; note = 2'-O-methyl modified nucleotide with phosphorothioate linkage
  modified_base 3: mod_base = OTHER; note = 2'-O-methyl modified nucleotide
  modified_base 4: mod_base = OTHER; note = 2'-O-methyl modified nucleotide
  modified_base 5: mod_base = OTHER; note = 2'-fluoro modified nucleotide
  modified_base 6: mod_base = OTHER; note = 2'-O-methyl modified nucleotide
  modified_base 7: mod_base = OTHER; note = 2'-fluoro modified nucleotide
  modified_base 8: mod_base = OTHER; note = 2'-fluoro modified nucleotide
  modified_base 9: mod_base = OTHER; note = 2'-fluoro modified nucleotide
  modified_base 10: mod_base = OTHER; note = 2'-O-methyl modified nucleotide
  modified_base 11: mod_base = OTHER; note = 2'-O-methyl modified nucleotide
  modified_base 12: mod_base = OTHER; note = 2'-O-methyl modified nucleotide
  modified_base 13: mod_base = OTHER; note = 2'-O-methyl modified nucleotide
  modified_base 14: mod_base = OTHER; note = 2'-O-methyl modified nucleotide
  modified_base 15: mod_base = OTHER; note = 2'-O-methyl modified nucleotide
  modified_base 16: mod_base = OTHER; note = 2'-O-methyl modified nucleotide
  modified_base 17: mod_base = OTHER; note = 2'-O-methyl modified nucleotide
  modified_base 18: mod_base = OTHER; note = 2'-O-methyl modified nucleotide
  modified_base 19: mod_base = OTHER; note = 2'-O-methyl modified nucleotide
actgcctcacaggaggata

SEQ ID NO: 785 - RNA, 19 nt, synthetic construct
  source 1..19: mol_type = other RNA
  modified_base 1: mod_base = OTHER; note = 2'-O-methyl modified nucleotide with phosphorothioate linkage
  modified_base 2: mod_base = OTHER; note = 2'-O-methyl modified nucleotide with phosphorothioate linkage
  modified_base 3: mod_base = OTHER; note = 2'-O-methyl modified nucleotide
  modified_base 4: mod_base = OTHER; note = 2'-O-methyl modified nucleotide
  modified_base 5: mod_base = OTHER; note = 2'-fluoro modified nucleotide
  modified_base 6: mod_base = OTHER; note = 2'-O-methyl modified nucleotide
  modified_base 7: mod_base = OTHER; note = 2'-fluoro modified nucleotide
  modified_base 8: mod_base = OTHER; note = 2'-fluoro modified nucleotide
  modified_base 9: mod_base = OTHER; note = 2'-fluoro modified nucleotide
  modified_base 10: mod_base = OTHER; note = 2'-O-methyl modified nucleotide
  modified_base 11: mod_base = OTHER; note = 2'-O-methyl modified nucleotide
  modified_base 12: mod_base = OTHER; note = 2'-O-methyl modified nucleotide
  modified_base 13: mod_base = OTHER; note = 2'-O-methyl modified nucleotide
  modified_base 14: mod_base = OTHER; note = 2'-O-methyl modified nucleotide
  modified_base 15: mod_base = OTHER; note = 2'-O-methyl modified nucleotide
  modified_base 16: mod_base = OTHER; note = 2'-O-methyl modified nucleotide
  modified_base 17: mod_base = OTHER; note = 2'-O-methyl modified nucleotide
  modified_base 18: mod_base = OTHER; note = 2'-O-methyl modified nucleotide
  modified_base 19: mod_base = OTHER; note = 2'-O-methyl modified nucleotide
acccaactttggcaagcga

SEQ ID NO: 786 - RNA, 19 nt, synthetic construct
  source 1..19: mol_type = other RNA
  modified_base 1: mod_base = OTHER; note = 2'-O-methyl modified nucleotide with phosphorothioate linkage
  modified_base 2: mod_base = OTHER; note = 2'-O-methyl modified nucleotide with phosphorothioate linkage
  modified_base 3: mod_base = OTHER; note = 2'-O-methyl modified nucleotide
  modified_base 4: mod_base = OTHER; note = 2'-O-methyl modified nucleotide
  modified_base 5: mod_base = OTHER; note = 2'-fluoro modified nucleotide
  modified_base 6: mod_base = OTHER; note = 2'-O-methyl modified nucleotide
  modified_base 7: mod_base = OTHER; note = 2'-fluoro modified nucleotide
  modified_base 8: mod_base = OTHER; note = 2'-fluoro modified nucleotide
  modified_base 9: mod_base = OTHER; note = 2'-fluoro modified nucleotide
  modified_base 10: mod_base = OTHER; note = 2'-O-methyl modified nucleotide
  modified_base 11: mod_base = OTHER; note = 2'-O-methyl modified nucleotide
  modified_base 12: mod_base = OTHER; note = 2'-O-methyl modified nucleotide
  modified_base 13: mod_base = OTHER; note = 2'-O-methyl modified nucleotide
  modified_base 14: mod_base = OTHER; note = 2'-O-methyl modified nucleotide
  modified_base 15: mod_base = OTHER; note = 2'-O-methyl modified nucleotide
  modified_base 16: mod_base = OTHER; note = 2'-O-methyl modified nucleotide
  modified_base 17: mod_base = OTHER; note = 2'-O-methyl modified nucleotide
  modified_base 18: mod_base = OTHER; note = 2'-O-methyl modified nucleotide
  modified_base 19: mod_base = OTHER; note = 2'-O-methyl modified nucleotide
ggctcacttatggaagcca

SEQ ID NO: 787 - RNA, 19 nt, synthetic construct
  source 1..19: mol_type = other RNA
  modified_base 1: mod_base = OTHER; note = 2'-O-methyl modified nucleotide with phosphorothioate linkage
  modified_base 2: mod_base = OTHER; note = 2'-O-methyl modified nucleotide with phosphorothioate linkage
  modified_base 3: mod_base = OTHER; note = 2'-O-methyl modified nucleotide
  modified_base 4: mod_base = OTHER; note = 2'-O-methyl modified nucleotide
  modified_base 5: mod_base = OTHER; note = 2'-fluoro modified nucleotide
  modified_base 6: mod_base = OTHER; note = 2'-O-methyl modified nucleotide
  modified_base 7: mod_base = OTHER; note = 2'-fluoro modified nucleotide
  modified_base 8: mod_base = OTHER; note = 2'-fluoro modified nucleotide
  modified_base 9: mod_base = OTHER; note = 2'-fluoro modified nucleotide
  modified_base 10: mod_base = OTHER; note = 2'-O-methyl modified nucleotide
  modified_base 11: mod_base = OTHER; note = 2'-O-methyl modified nucleotide
  modified_base 12: mod_base = OTHER; note = 2'-O-methyl modified nucleotide
  modified_base 13: mod_base = OTHER; note = 2'-O-methyl modified nucleotide
  modified_base 14: mod_base = OTHER; note = 2'-O-methyl modified nucleotide
  modified_base 15: mod_base = OTHER; note = 2'-O-methyl modified nucleotide
  modified_base 16: mod_base = OTHER; note = 2'-O-methyl modified nucleotide
  modified_base 17: mod_base = OTHER; note = 2'-O-methyl modified nucleotide
  modified_base 18: mod_base = OTHER; note = 2'-O-methyl modified nucleotide
  modified_base 19: mod_base = OTHER; note = 2'-O-methyl modified nucleotide
ggccgtcacagttctctca

SEQ ID NO: 788 - RNA, 19 nt, synthetic construct
  source 1..19: mol_type = other RNA
  modified_base 1: mod_base = OTHER; note = 2'-O-methyl modified nucleotide with phosphorothioate linkage
  modified_base 2: mod_base = OTHER; note = 2'-O-methyl modified nucleotide with phosphorothioate linkage
  modified_base 3: mod_base = OTHER; note = 2'-O-methyl modified nucleotide
  modified_base 4: mod_base = OTHER; note = 2'-O-methyl modified nucleotide
  modified_base 5: mod_base = OTHER; note = 2'-fluoro modified nucleotide
  modified_base 6: mod_base = OTHER; note = 2'-O-methyl modified nucleotide
  modified_base 7: mod_base = OTHER; note = 2'-fluoro modified nucleotide
  modified_base 8: mod_base = OTHER; note = 2'-fluoro modified nucleotide
  modified_base 9: mod_base = OTHER; note = 2'-fluoro modified nucleotide
  modified_base 10: mod_base = OTHER; note = 2'-O-methyl modified nucleotide
  modified_base 11: mod_base = OTHER; note = 2'-O-methyl modified nucleotide
  modified_base 12: mod_base = OTHER; note = 2'-O-methyl modified nucleotide
  modified_base 13: mod_base = OTHER; note = 2'-O-methyl modified nucleotide
  modified_base 14: mod_base = OTHER; note = 2'-O-methyl modified nucleotide
  modified_base 15: mod_base = OTHER; note = 2'-O-methyl modified nucleotide
  modified_base 16: mod_base = OTHER; note = 2'-O-methyl modified nucleotide
  modified_base 17: mod_base = OTHER; note = 2'-O-methyl modified nucleotide
  modified_base 18: mod_base = OTHER; note = 2'-O-methyl modified nucleotide
  modified_base 19: mod_base = OTHER; note = 2'-O-methyl modified nucleotide
aaatacccaaatcccatta

SEQ ID NO: 789 - RNA, 19 nt, synthetic construct
  source 1..19: mol_type = other RNA
  modified_base 1: mod_base = OTHER; note = 2'-O-methyl modified nucleotide with phosphorothioate linkage
  modified_base 2: mod_base = OTHER; note = 2'-O-methyl modified nucleotide with phosphorothioate linkage
  modified_base 3: mod_base = OTHER; note = 2'-O-methyl modified nucleotide
  modified_base 4: mod_base = OTHER; note = 2'-O-methyl modified nucleotide
  modified_base 5: mod_base = OTHER; note = 2'-fluoro modified nucleotide
  modified_base 6: mod_base = OTHER; note = 2'-O-methyl modified nucleotide
  modified_base 7: mod_base = OTHER; note = 2'-fluoro modified nucleotide
  modified_base 8: mod_base = OTHER; note = 2'-fluoro modified nucleotide
  modified_base 9: mod_base = OTHER; note = 2'-fluoro modified nucleotide
  modified_base 10: mod_base = OTHER; note = 2'-O-methyl modified nucleotide
  modified_base 11: mod_base = OTHER; note = 2'-O-methyl modified nucleotide
  modified_base 12: mod_base = OTHER; note = 2'-O-methyl modified nucleotide
  modified_base 13: mod_base = OTHER; note = 2'-O-methyl modified nucleotide
  modified_base 14: mod_base = OTHER; note = 2'-O-methyl modified nucleotide
  modified_base 15: mod_base = OTHER; note = 2'-O-methyl modified nucleotide
  modified_base 16: mod_base = OTHER; note = 2'-O-methyl modified nucleotide
  modified_base 17: mod_base = OTHER; note = 2'-O-methyl modified nucleotide
  modified_base 18: mod_base = OTHER; note = 2'-O-methyl modified nucleotide
  modified_base 19: mod_base = OTHER; note = 2'-O-methyl modified nucleotide
ctgaagtcattggaccaca

SEQ ID NO: 790 - RNA, 19 nt, synthetic construct
  source 1..19: mol_type = other RNA
  modified_base 1: mod_base = OTHER; note = 2'-O-methyl modified nucleotide with phosphorothioate linkage
  modified_base 2: mod_base = OTHER; note = 2'-O-methyl modified nucleotide with phosphorothioate linkage
  modified_base 3: mod_base = OTHER; note = 2'-O-methyl modified nucleotide
  modified_base 4: mod_base = OTHER; note = 2'-O-methyl modified nucleotide
  modified_base 5: mod_base = OTHER; note = 2'-fluoro modified nucleotide
  modified_base 6: mod_base = OTHER; note = 2'-O-methyl modified nucleotide
  modified_base 7: mod_base = OTHER; note = 2'-fluoro modified nucleotide
  modified_base 8: mod_base = OTHER; note = 2'-fluoro modified nucleotide
  modified_base 9: mod_base = OTHER; note = 2'-fluoro modified nucleotide
  modified_base 10: mod_base = OTHER; note = 2'-O-methyl modified nucleotide
  modified_base 11: mod_base = OTHER; note = 2'-O-methyl modified nucleotide
  modified_base 12: mod_base = OTHER; note = 2'-O-methyl modified nucleotide
  modified_base 13: mod_base = OTHER; note = 2'-O-methyl modified nucleotide
  modified_base 14: mod_base = OTHER; note = 2'-O-methyl modified nucleotide
  modified_base 15: mod_base = OTHER; note = 2'-O-methyl modified nucleotide
  modified_base 16: mod_base = OTHER; note = 2'-O-methyl modified nucleotide
  modified_base 17: mod_base = OTHER; note = 2'-O-methyl modified nucleotide
  modified_base 18: mod_base = OTHER; note = 2'-O-methyl modified nucleotide
  modified_base 19: mod_base = OTHER; note = 2'-O-methyl modified nucleotide
cgtcctcaaatccaaacga

SEQ ID NO: 791 - RNA, 19 nt, synthetic construct
  source 1..19: mol_type = other RNA
  modified_base 1: mod_base = OTHER; note = 2'-O-methyl modified nucleotide with phosphorothioate linkage
  modified_base 2: mod_base = OTHER; note = 2'-O-methyl modified nucleotide with phosphorothioate linkage
  modified_base 3: mod_base = OTHER; note = 2'-O-methyl modified nucleotide
  modified_base 4: mod_base = OTHER; note = 2'-O-methyl modified nucleotide
  modified_base 5: mod_base = OTHER; note = 2'-fluoro modified nucleotide
  modified_base 6: mod_base = OTHER; note = 2'-O-methyl modified nucleotide
  modified_base 7: mod_base = OTHER; note = 2'-fluoro modified nucleotide
  modified_base 8: mod_base = OTHER; note = 2'-fluoro modified nucleotide
  modified_base 9: mod_base = OTHER; note = 2'-fluoro modified nucleotide
  modified_base 10: mod_base = OTHER; note = 2'-O-methyl modified nucleotide
  modified_base 11: mod_base = OTHER; note = 2'-O-methyl modified nucleotide
  modified_base 12: mod_base = OTHER; note = 2'-O-methyl modified nucleotide
  modified_base 13: mod_base = OTHER; note = 2'-O-methyl modified nucleotide
  modified_base 14: mod_base = OTHER; note = 2'-O-methyl modified nucleotide
  modified_base 15: mod_base = OTHER; note = 2'-O-methyl modified nucleotide
  modified_base 16: mod_base = OTHER; note = 2'-O-methyl modified nucleotide
  modified_base 17: mod_base = OTHER; note = 2'-O-methyl modified nucleotide
  modified_base 18: mod_base = OTHER; note = 2'-O-methyl modified nucleotide
  modified_base 19: mod_base = OTHER; note = 2'-O-methyl modified nucleotide
ccaactttggcaagcgcca

SEQ ID NO: 792 - RNA, 19 nt, synthetic construct
  source 1..19: mol_type = other RNA
  modified_base 1: mod_base = OTHER; note = 2'-O-methyl modified nucleotide with phosphorothioate linkage
  modified_base 2: mod_base = OTHER; note = 2'-O-methyl modified nucleotide with phosphorothioate linkage
  modified_base 3: mod_base = OTHER; note = 2'-O-methyl modified nucleotide
  modified_base 4: mod_base = OTHER; note = 2'-O-methyl modified nucleotide
  modified_base 5: mod_base = OTHER; note = 2'-fluoro modified nucleotide
  modified_base 6: mod_base = OTHER; note = 2'-O-methyl modified nucleotide
  modified_base 7: mod_base = OTHER; note = 2'-fluoro modified nucleotide
  modified_base 8: mod_base = OTHER; note = 2'-fluoro modified nucleotide
  modified_base 9: mod_base = OTHER; note = 2'-fluoro modified nucleotide
  modified_base 10: mod_base = OTHER; note = 2'-O-methyl modified nucleotide
  modified_base 11: mod_base = OTHER; note = 2'-O-methyl modified nucleotide
  modified_base 12: mod_base = OTHER; note = 2'-O-methyl modified nucleotide
  modified_base 13: mod_base = OTHER; note = 2'-O-methyl modified nucleotide
  modified_base 14: mod_base = OTHER; note = 2'-O-methyl modified nucleotide
  modified_base 15: mod_base = OTHER; note = 2'-O-methyl modified nucleotide
  modified_base 16: mod_base = OTHER; note = 2'-O-methyl modified nucleotide
  modified_base 17: mod_base = OTHER; note = 2'-O-methyl modified nucleotide
  modified_base 18: mod_base = OTHER; note = 2'-O-methyl modified nucleotide
  modified_base 19: mod_base = OTHER; note = 2'-O-methyl modified nucleotide
catgcgctatgtcatcaaa

SEQ ID NO: 793 - RNA, 19 nt, synthetic construct
  source 1..19: mol_type = other RNA
  modified_base 1: mod_base = OTHER; note = 2'-O-methyl modified nucleotide with phosphorothioate linkage
  modified_base 2: mod_base = OTHER; note = 2'-O-methyl modified nucleotide with phosphorothioate linkage
  modified_base 3: mod_base = OTHER; note = 2'-O-methyl modified nucleotide
  modified_base 4: mod_base = OTHER; note = 2'-O-methyl modified nucleotide
  modified_base 5: mod_base = OTHER; note = 2'-fluoro modified nucleotide
  modified_base 6: mod_base = OTHER; note = 2'-O-methyl modified nucleotide
  modified_base 7: mod_base = OTHER; note = 2'-fluoro modified nucleotide
  modified_base 8: mod_base = OTHER; note = 2'-fluoro modified nucleotide
  modified_base 9: mod_base = OTHER; note = 2'-fluoro modified nucleotide
  modified_base 10: mod_base = OTHER; note = 2'-O-methyl modified nucleotide
  modified_base 11: mod_base = OTHER; note = 2'-O-methyl modified nucleotide
  modified_base 12: mod_base = OTHER; note = 2'-O-methyl modified nucleotide
  modified_base 13: mod_base = OTHER; note = 2'-O-methyl modified nucleotide
  modified_base 14: mod_base = OTHER; note = 2'-O-methyl modified nucleotide
  modified_base 15: mod_base = OTHER; note = 2'-O-methyl modified nucleotide
  modified_base 16: mod_base = OTHER; note = 2'-O-methyl modified nucleotide
  modified_base 17: mod_base = OTHER; note = 2'-O-methyl modified nucleotide
  modified_base 18: mod_base = OTHER; note = 2'-O-methyl modified nucleotide
  modified_base 19: mod_base = OTHER; note = 2'-O-methyl modified nucleotide
gcaagcgccccacagacca

SEQ ID NO: 794 - RNA, 19 nt, synthetic construct
  source 1..19: mol_type = other RNA
  modified_base 1: mod_base = OTHER; note = 2'-O-methyl modified nucleotide with phosphorothioate linkage
  modified_base 2: mod_base = OTHER; note = 2'-O-methyl modified nucleotide with phosphorothioate linkage
  modified_base 3: mod_base = OTHER; note = 2'-O-methyl modified nucleotide
  modified_base 4: mod_base = OTHER; note = 2'-O-methyl modified nucleotide
  modified_base 5: mod_base = OTHER; note = 2'-fluoro modified nucleotide
  modified_base 6: mod_base = OTHER; note = 2'-O-methyl modified nucleotide
  modified_base 7: mod_base = OTHER; note = 2'-fluoro modified nucleotide
  modified_base 8: mod_base = OTHER; note = 2'-fluoro modified nucleotide
  modified_base 9: mod_base = OTHER; note = 2'-fluoro modified nucleotide
  modified_base 10: mod_base = OTHER; note = 2'-O-methyl modified nucleotide
  modified_base 11: mod_base = OTHER; note = 2'-O-methyl modified nucleotide
  modified_base 12: mod_base = OTHER; note = 2'-O-methyl modified nucleotide
  modified_base 13: mod_base = OTHER; note = 2'-O-methyl modified nucleotide
  modified_base 14: mod_base = OTHER; note = 2'-O-methyl modified nucleotide
  modified_base 15: mod_base = OTHER; note = 2'-O-methyl modified nucleotide
  modified_base 16: mod_base = OTHER; note = 2'-O-methyl modified nucleotide
  modified_base 17: mod_base = OTHER; note = 2'-O-methyl modified nucleotide
  modified_base 18: mod_base = OTHER; note = 2'-O-methyl modified nucleotide
  modified_base 19: mod_base = OTHER; note = 2'-O-methyl modified nucleotide
ctgtccaatgtcttcagta

SEQ ID NO: 795 - RNA, 19 nt, synthetic construct
  source 1..19: mol_type = other RNA
  modified_base 1: mod_base = OTHER; note = 2'-O-methyl modified nucleotide with phosphorothioate linkage
  modified_base 2: mod_base = OTHER; note = 2'-O-methyl modified nucleotide with phosphorothioate linkage
  modified_base 3: mod_base = OTHER; note = 2'-O-methyl modified nucleotide
  modified_base 4: mod_base = OTHER; note = 2'-O-methyl modified nucleotide
  modified_base 5: mod_base = OTHER; note = 2'-fluoro modified nucleotide
  modified_base 6: mod_base = OTHER; note = 2'-O-methyl modified nucleotide
  modified_base 7: mod_base = OTHER; note = 2'-fluoro modified nucleotide
  modified_base 8: mod_base = OTHER; note = 2'-fluoro modified nucleotide
  modified_base 9: mod_base = OTHER; note = 2'-fluoro modified nucleotide
  modified_base 10: mod_base = OTHER; note = 2'-O-methyl modified nucleotide
  modified_base 11: mod_base = OTHER; note = 2'-O-methyl modified nucleotide
  modified_base 12: mod_base = OTHER; note = 2'-O-methyl modified nucleotide
  modified_base 13: mod_base = OTHER; note = 2'-O-methyl modified nucleotide
  modified_base 14: mod_base = OTHER; note = 2'-O-methyl modified nucleotide
  modified_base 15: mod_base = OTHER; note = 2'-O-methyl modified nucleotide
  modified_base 16: mod_base = OTHER; note = 2'-O-methyl modified nucleotide
  modified_base 17: mod_base = OTHER; note = 2'-O-methyl modified nucleotide
  modified_base 18: mod_base = OTHER; note = 2'-O-methyl modified nucleotide
  modified_base 19: mod_base = OTHER; note = 2'-O-methyl modified nucleotide
tgcacaagaaacggagtca

SEQ ID NO: 796 - RNA, 19 nt, synthetic construct
  source 1..19: mol_type = other RNA
  modified_base 1: mod_base = OTHER; note = 2'-O-methyl modified nucleotide with phosphorothioate linkage
  modified_base 2: mod_base = OTHER; note = 2'-O-methyl modified nucleotide with phosphorothioate linkage
  modified_base 3: mod_base = OTHER; note = 2'-O-methyl modified nucleotide
  modified_base 4: mod_base = OTHER; note = 2'-O-methyl modified nucleotide
  modified_base 5: mod_base = OTHER; note = 2'-fluoro modified nucleotide
  modified_base 6: mod_base = OTHER; note = 2'-O-methyl modified nucleotide
  modified_base 7: mod_base = OTHER; note = 2'-fluoro modified nucleotide
  modified_base 8: mod_base = OTHER; note = 2'-fluoro modified nucleotide
  modified_base 9: mod_base = OTHER; note = 2'-fluoro modified nucleotide
  modified_base 10: mod_base = OTHER; note = 2'-O-methyl modified nucleotide
  modified_base 11: mod_base = OTHER; note = 2'-O-methyl modified nucleotide
  modified_base 12: mod_base = OTHER; note = 2'-O-methyl modified nucleotide
  modified_base 13: mod_base = OTHER; note = 2'-O-methyl modified nucleotide
  modified_base 14: mod_base = OTHER; note = 2'-O-methyl modified nucleotide
  modified_base 15: mod_base = OTHER; note = 2'-O-methyl modified nucleotide
  modified_base 16: mod_base = OTHER; note = 2'-O-methyl modified nucleotide
  modified_base 17: mod_base = OTHER; note = 2'-O-methyl modified nucleotide
  modified_base 18: mod_base = OTHER; note = 2'-O-methyl modified nucleotide
  modified_base 19: mod_base = OTHER; note = 2'-O-methyl modified nucleotide
cagcattgtgatgaccaca

SEQ ID NO: 797 - RNA, 19 nt, synthetic construct
  source 1..19: mol_type = other RNA
  modified_base 1: mod_base = OTHER; note = 2'-O-methyl modified nucleotide with phosphorothioate linkage
  modified_base 2: mod_base = OTHER; note = 2'-O-methyl modified nucleotide with phosphorothioate linkage
  modified_base 3: mod_base = OTHER; note = 2'-O-methyl modified nucleotide
  modified_base 4: mod_base = OTHER; note = 2'-O-methyl modified nucleotide
  modified_base 5: mod_base = OTHER; note = 2'-fluoro modified nucleotide
  modified_base 6: mod_base = OTHER; note = 2'-O-methyl modified nucleotide
  modified_base 7: mod_base = OTHER; note = 2'-fluoro modified nucleotide
  modified_base 8: mod_base = OTHER; note = 2'-fluoro modified nucleotide
  modified_base 9: mod_base = OTHER; note = 2'-fluoro modified nucleotide
  modified_base 10: mod_base = OTHER; note = 2'-O-methyl modified nucleotide
  modified_base 11: mod_base = OTHER; note = 2'-O-methyl modified nucleotide
  modified_base 12: mod_base = OTHER; note = 2'-O-methyl modified nucleotide
  modified_base 13: mod_base = OTHER; note = 2'-O-methyl modified nucleotide
  modified_base 14: mod_base = OTHER; note = 2'-O-methyl modified nucleotide
  modified_base 15: mod_base = OTHER; note = 2'-O-methyl modified nucleotide
  modified_base 16: mod_base = OTHER; note = 2'-O-methyl modified nucleotide
  modified_base 17: mod_base = OTHER; note = 2'-O-methyl modified nucleotide
  modified_base 18: mod_base = OTHER; note = 2'-O-methyl modified nucleotide
  modified_base 19: mod_base = OTHER; note = 2'-O-methyl modified nucleotide
tcatgctctcgctgggcta

SEQ ID NO: 798 - RNA, 19 nt, synthetic construct
  source 1..19: mol_type = other RNA
  modified_base 1: mod_base = OTHER; note = 2'-O-methyl modified nucleotide with phosphorothioate linkage
  modified_base 2: mod_base = OTHER; note = 2'-O-methyl modified nucleotide with phosphorothioate linkage
  modified_base 3: mod_base = OTHER; note = 2'-O-methyl modified nucleotide
  modified_base 4: mod_base = OTHER; note = 2'-O-methyl modified nucleotide
  modified_base 5: mod_base = OTHER; note = 2'-fluoro modified nucleotide
  modified_base 6: mod_base = OTHER; note = 2'-O-methyl modified nucleotide
  modified_base 7: mod_base = OTHER; note = 2'-fluoro modified nucleotide
  modified_base 8: mod_base = OTHER; note = 2'-fluoro modified nucleotide
  modified_base 9: mod_base = OTHER; note = 2'-fluoro modified nucleotide
  modified_base 10: mod_base = OTHER; note = 2'-O-methyl modified nucleotide
  modified_base 11: mod_base = OTHER; note = 2'-O-methyl modified nucleotide
  modified_base 12: mod_base = OTHER; note = 2'-O-methyl modified nucleotide
  modified_base 13: mod_base = OTHER; note = 2'-O-methyl modified nucleotide
  modified_base 14: mod_base = OTHER; note = 2'-O-methyl modified nucleotide
  modified_base 15: mod_base = OTHER; note = 2'-O-methyl modified nucleotide
  modified_base 16: mod_base = OTHER; note = 2'-O-methyl modified nucleotide
  modified_base 17: mod_base = OTHER; note = 2'-O-methyl modified nucleotide
  modified_base 18: mod_base = OTHER; note = 2'-O-methyl modified nucleotide
  modified_base 19: mod_base = OTHER; note = 2'-O-methyl modified nucleotide
cgccctggtggcacagtaa

SEQ ID NO: 799 - RNA, 19 nt, synthetic construct
  source 1..19: mol_type = other RNA
  modified_base 1: mod_base = OTHER; note = 2'-O-methyl modified nucleotide with phosphorothioate linkage
  modified_base 2: mod_base = OTHER; note = 2'-O-methyl modified nucleotide with phosphorothioate linkage
  modified_base 3: mod_base = OTHER; note = 2'-O-methyl modified nucleotide
  modified_base 4: mod_base = OTHER; note = 2'-O-methyl modified nucleotide
  modified_base 5: mod_base = OTHER; note = 2'-fluoro modified nucleotide
  modified_base 6: mod_base = OTHER; note = 2'-O-methyl modified nucleotide
  modified_base 7: mod_base = OTHER; note = 2'-fluoro modified nucleotide
  modified_base 8: mod_base = OTHER; note = 2'-fluoro modified nucleotide
  modified_base 9: mod_base = OTHER; note = 2'-fluoro modified nucleotide
  modified_base 10: mod_base = OTHER; note = 2'-O-methyl modified nucleotide
  modified_base 11: mod_base = OTHER; note = 2'-O-methyl modified nucleotide
  modified_base 12: mod_base = OTHER; note = 2'-O-methyl modified nucleotide
  modified_base 13: mod_base = OTHER; note = 2'-O-methyl modified nucleotide
  modified_base 14: mod_base = OTHER; note = 2'-O-methyl modified nucleotide
  modified_base 15: mod_base = OTHER; note = 2'-O-methyl modified nucleotide
  modified_base 16: mod_base = OTHER; note = 2'-O-methyl modified nucleotide
  modified_base 17: mod_base = OTHER; note = 2'-O-methyl modified nucleotide
  modified_base 18: mod_base = OTHER; note = 2'-O-methyl modified nucleotide
  modified_base 19: mod_base = OTHER; note = 2'-O-methyl modified nucleotide
tccaaacggccacaataca

SEQ ID NO: 800 - RNA, 19 nt, synthetic construct
  source 1..19: mol_type = other RNA
  modified_base 1: mod_base = OTHER; note = 2'-O-methyl modified nucleotide with phosphorothioate linkage
  modified_base 2: mod_base = OTHER; note = 2'-O-methyl modified nucleotide with phosphorothioate linkage
  modified_base 3: mod_base = OTHER; note = 2'-O-methyl modified nucleotide
  modified_base 4: mod_base = OTHER; note = 2'-O-methyl modified nucleotide
  modified_base 5: mod_base = OTHER; note = 2'-fluoro modified nucleotide
  modified_base 6: mod_base = OTHER; note = 2'-O-methyl modified nucleotide
  modified_base 7: mod_base = OTHER; note = 2'-fluoro modified nucleotide
  modified_base 8: mod_base = OTHER; note = 2'-fluoro modified nucleotide
  modified_base 9: mod_base = OTHER; note = 2'-fluoro modified nucleotide
  modified_base 10: mod_base = OTHER; note = 2'-O-methyl modified nucleotide
  modified_base 11: mod_base = OTHER; note = 2'-O-methyl modified nucleotide
  modified_base 12: mod_base = OTHER; note = 2'-O-methyl modified nucleotide
  modified_base 13: mod_base = OTHER; note = 2'-O-methyl modified nucleotide
  modified_base 14: mod_base = OTHER; note = 2'-O-methyl modified nucleotide
  modified_base 15: mod_base = OTHER; note = 2'-O-methyl modified nucleotide
  modified_base 16: mod_base = OTHER; note = 2'-O-methyl modified nucleotide
  modified_base 17: mod_base = OTHER; note = 2'-O-methyl modified nucleotide
  modified_base 18: mod_base = OTHER; note = 2'-O-methyl modified nucleotide
  modified_base 19: mod_base = OTHER; note = 2'-O-methyl modified nucleotide
cggccacaatacatgcgca

SEQ ID NO: 801 - RNA, 19 nt, synthetic construct
  source 1..19: mol_type = other RNA
  modified_base 1: mod_base = OTHER; note = 2'-O-methyl modified nucleotide with phosphorothioate linkage
  modified_base 2: mod_base = OTHER; note = 2'-O-methyl modified nucleotide with phosphorothioate linkage
  modified_base 3: mod_base = OTHER; note = 2'-O-methyl modified nucleotide
  modified_base 4: mod_base = OTHER; note = 2'-O-methyl modified nucleotide
  modified_base 5: mod_base = OTHER; note = 2'-fluoro modified nucleotide
  modified_base 6: mod_base = OTHER; note = 2'-O-methyl modified nucleotide
  modified_base 7: mod_base = OTHER; note = 2'-fluoro modified nucleotide
  modified_base 8: mod_base = OTHER; note = 2'-fluoro modified nucleotide
  modified_base 9: mod_base = OTHER; note = 2'-fluoro modified nucleotide
  modified_base 10: mod_base = OTHER; note = 2'-O-methyl modified nucleotide
  modified_base 11: mod_base = OTHER; note = 2'-O-methyl modified nucleotide
  modified_base 12: mod_base = OTHER; note = 2'-O-methyl modified nucleotide
  modified_base 13: mod_base = OTHER; note = 2'-O-methyl modified nucleotide
  modified_base 14: mod_base = OTHER; note = 2'-O-methyl modified nucleotide
  modified_base 15: mod_base = OTHER; note = 2'-O-methyl modified nucleotide
  modified_base 16: mod_base = OTHER; note = 2'-O-methyl modified nucleotide
  modified_base 17: mod_base = OTHER; note = 2'-O-methyl modified nucleotide
  modified_base 18: mod_base = OTHER; note = 2'-O-methyl modified nucleotide
  modified_base 19: mod_base = OTHER; note = 2'-O-methyl modified nucleotide
atgcgctatgtcatcaaga

SEQ ID NO: 802 - RNA, 19 nt, synthetic construct
  source 1..19: mol_type = other RNA
  modified_base 1: mod_base = OTHER; note = 2'-O-methyl modified nucleotide with phosphorothioate linkage
  modified_base 2: mod_base = OTHER; note = 2'-O-methyl modified nucleotide with phosphorothioate linkage
  modified_base 3: mod_base = OTHER; note = 2'-O-methyl modified nucleotide
  modified_base 4: mod_base = OTHER; note = 2'-O-methyl modified nucleotide
  modified_base 5: mod_base = OTHER; note = 2'-fluoro modified nucleotide
  modified_base 6: mod_base = OTHER; note = 2'-O-methyl modified nucleotide
  modified_base 7: mod_base = OTHER; note = 2'-fluoro modified nucleotide
  modified_base 8: mod_base = OTHER; note = 2'-fluoro modified nucleotide
  modified_base 9: mod_base = OTHER; note = 2'-fluoro modified nucleotide
  modified_base 10: mod_base = OTHER; note = 2'-O-methyl modified nucleotide
  modified_base 11: mod_base = OTHER; note = 2'-O-methyl modified nucleotide
  modified_base 12: mod_base = OTHER; note = 2'-O-methyl modified nucleotide
  modified_base 13: mod_base = OTHER; note = 2'-O-methyl modified nucleotide
  modified_base 14: mod_base = OTHER; note = 2'-O-methyl modified nucleotide
  modified_base 15: mod_base = OTHER; note = 2'-O-methyl modified nucleotide
  modified_base 16: mod_base = OTHER; note = 2'-O-methyl modified nucleotide
  modified_base 17: mod_base = OTHER; note = 2'-O-methyl modified nucleotide
  modified_base 18: mod_base = OTHER; note = 2'-O-methyl modified nucleotide
  modified_base 19: mod_base = OTHER; note = 2'-O-methyl modified nucleotide
tgcgctatgtcatcaagga

SEQ ID NO: 803 - RNA, 19 nt, synthetic construct
  source 1..19: mol_type = other RNA
  modified_base 1: mod_base = OTHER; note = 2'-O-methyl modified nucleotide with phosphorothioate linkage
  modified_base 2: mod_base = OTHER; note = 2'-O-methyl modified nucleotide with phosphorothioate linkage
  modified_base 3: mod_base = OTHER; note = 2'-O-methyl modified nucleotide
  modified_base 4: mod_base = OTHER; note = 2'-O-methyl modified nucleotide
  modified_base 5: mod_base = OTHER; note = 2'-fluoro modified nucleotide
  modified_base 6: mod_base = OTHER; note = 2'-O-methyl modified nucleotide
  modified_base 7: mod_base = OTHER; note = 2'-fluoro modified nucleotide
  modified_base 8: mod_base = OTHER; note = 2'-fluoro modified nucleotide
  modified_base 9: mod_base = OTHER; note = 2'-fluoro modified nucleotide
  modified_base 10: mod_base = OTHER; note = 2'-O-methyl modified nucleotide
  modified_base 11: mod_base = OTHER; note = 2'-O-methyl modified nucleotide
  modified_base 12: mod_base = OTHER; note = 2'-O-methyl modified nucleotide
  modified_base 13: mod_base = OTHER; note = 2'-O-methyl modified nucleotide
  modified_base 14: mod_base = OTHER; note = 2'-O-methyl modified nucleotide
  modified_base 15: mod_base = OTHER; note = 2'-O-methyl modified nucleotide
  modified_base 16: mod_base = OTHER; note = 2'-O-methyl modified nucleotide
  modified_base 17: mod_base = OTHER; note = 2'-O-methyl modified nucleotide
  modified_base 18: mod_base = OTHER; note = 2'-O-methyl modified nucleotide
  modified_base 19: mod_base = OTHER; note = 2'-O-methyl modified nucleotide
agtggtcttccactgccta

SEQ ID NO: 804 - RNA, 19 nt, synthetic construct
  source 1..19: mol_type = other RNA
  modified_base 1: mod_base = OTHER; note = 2'-O-methyl modified nucleotide with phosphorothioate linkage
  modified_base 2: mod_base = OTHER; note = 2'-O-methyl modified nucleotide with phosphorothioate linkage
  modified_base 3: mod_base = OTHER; note = 2'-O-methyl modified nucleotide
  modified_base 4: mod_base = OTHER; note = 2'-O-methyl modified nucleotide
  modified_base 5: mod_base = OTHER; note = 2'-fluoro modified nucleotide
  modified_base 6: mod_base = OTHER; note = 2'-O-methyl modified nucleotide
  modified_base 7: mod_base = OTHER; note = 2'-fluoro modified nucleotide
  modified_base 8: mod_base = OTHER; note = 2'-fluoro modified nucleotide
  modified_base 9: mod_base = OTHER; note = 2'-fluoro modified nucleotide
  modified_base 10: mod_base = OTHER; note = 2'-O-methyl modified nucleotide
  modified_base 11: mod_base = OTHER; note = 2'-O-methyl modified nucleotide
  modified_base 12: mod_base = OTHER; note = 2'-O-methyl modified nucleotide
  modified_base 13: mod_base = OTHER; note = 2'-O-methyl modified nucleotide
  modified_base 14: mod_base = OTHER; note = 2'-O-methyl modified nucleotide
  modified_base 15: mod_base = OTHER; note = 2'-O-methyl modified nucleotide
  modified_base 16: mod_base = OTHER; note = 2'-O-methyl modified nucleotide
  modified_base 17: mod_base = OTHER; note = 2'-O-methyl modified nucleotide
  modified_base 18: mod_base = OTHER; note = 2'-O-methyl modified nucleotide
  modified_base 19: mod_base = OTHER; note = 2'-O-methyl modified nucleotide
aggtgccctataaaggcaa

SEQ ID NO: 805 - RNA, 19 nt, synthetic construct
  source 1..19: mol_type = other RNA
  modified_base 1: mod_base = OTHER; note = 2'-O-methyl modified nucleotide with phosphorothioate linkage
  modified_base 2: mod_base = OTHER; note = 2'-O-methyl modified nucleotide with phosphorothioate linkage
  modified_base 3: mod_base = OTHER; note = 2'-O-methyl modified nucleotide
  modified_base 4: mod_base = OTHER; note = 2'-O-methyl modified nucleotide
  modified_base 5: mod_base = OTHER; note = 2'-fluoro modified nucleotide
  modified_base 6: mod_base = OTHER; note = 2'-O-methyl modified nucleotide
  modified_base 7: mod_base = OTHER; note = 2'-fluoro modified nucleotide
  modified_base 8: mod_base = OTHER; note = 2'-fluoro modified nucleotide
  modified_base 9: mod_base = OTHER; note = 2'-fluoro modified nucleotide
  modified_base 10: mod_base = OTHER; note = 2'-O-methyl modified nucleotide
  modified_base 11: mod_base = OTHER; note = 2'-O-methyl modified nucleotide
  modified_base 12: mod_base = OTHER; note = 2'-O-methyl modified nucleotide
  modified_base 13: mod_base = OTHER; note = 2'-O-methyl modified nucleotide
  modified_base 14: mod_base = OTHER; note = 2'-O-methyl modified nucleotide
  modified_base 15: mod_base = OTHER; note = 2'-O-methyl modified nucleotide
  modified_base 16: mod_base = OTHER; note = 2'-O-methyl modified nucleotide
  modified_base 17: mod_base = OTHER; note = 2'-O-methyl modified nucleotide
  modified_base 18: mod_base = OTHER; note = 2'-O-methyl modified nucleotide
  modified_base 19: mod_base = OTHER; note = 2'-O-methyl modified nucleotide
tccccttgcacagcctaga

SEQ ID NO: 806 - RNA, 19 nt, synthetic construct
  source 1..19: mol_type = other RNA
  modified_base 1: mod_base = OTHER; note = 2'-O-methyl modified nucleotide with phosphorothioate linkage
  modified_base 2: mod_base = OTHER; note = 2'-O-methyl modified nucleotide with phosphorothioate linkage
  modified_base 3: mod_base = OTHER; note = 2'-O-methyl modified nucleotide
  modified_base 4: mod_base = OTHER; note = 2'-O-methyl modified nucleotide
  modified_base 5: mod_base = OTHER; note = 2'-fluoro modified nucleotide
  modified_base 6: mod_base = OTHER; note = 2'-O-methyl modified nucleotide
  modified_base 7: mod_base = OTHER; note = 2'-fluoro modified nucleotide
  modified_base 8: mod_base = OTHER; note = 2'-fluoro modified nucleotide
  modified_base 9: mod_base = OTHER; note = 2'-fluoro modified nucleotide
  modified_base 10: mod_base = OTHER; note = 2'-O-methyl modified nucleotide
  modified_base 11: mod_base = OTHER; note = 2'-O-methyl modified nucleotide
  modified_base 12: mod_base = OTHER; note = 2'-O-methyl modified nucleotide
  modified_base 13: mod_base = OTHER; note = 2'-O-methyl modified nucleotide
  modified_base 14: mod_base = OTHER; note = 2'-O-methyl modified nucleotide
  modified_base 15: mod_base = OTHER; note = 2'-O-methyl modified nucleotide
  modified_base 16: mod_base = OTHER; note = 2'-O-methyl modified nucleotide
  modified_base 17: mod_base = OTHER; note = 2'-O-methyl modified nucleotide
  modified_base 18: mod_base = OTHER; note = 2'-O-methyl modified nucleotide
  modified_base 19: mod_base = OTHER; note = 2'-O-methyl modified nucleotide
gcgctatgtcatcaaggga

SEQ ID NO: 807 - RNA, 19 nt, synthetic construct
  source 1..19: mol_type = other RNA
  modified_base 1: mod_base = OTHER; note = 2'-O-methyl modified nucleotide with phosphorothioate linkage
  modified_base 2: mod_base = OTHER; note = 2'-O-methyl modified nucleotide with phosphorothioate linkage
  modified_base 3: mod_base = OTHER; note = 2'-O-methyl modified nucleotide
  modified_base 4: mod_base = OTHER; note = 2'-O-methyl modified nucleotide
  modified_base 5: mod_base = OTHER; note = 2'-fluoro modified nucleotide
  modified_base 6: mod_base = OTHER; note = 2'-O-methyl modified nucleotide
  modified_base 7: mod_base = OTHER; note = 2'-fluoro modified nucleotide
  modified_base 8: mod_base = OTHER; note = 2'-fluoro modified nucleotide
  modified_base 9: mod_base = OTHER; note = 2'-fluoro modified nucleotide
  modified_base 10: mod_base = OTHER; note = 2'-O-methyl modified nucleotide
  modified_base 11: mod_base = OTHER; note = 2'-O-methyl modified nucleotide
  modified_base 12: mod_base = OTHER; note = 2'-O-methyl modified nucleotide
  modified_base 13: mod_base = OTHER; note = 2'-O-methyl modified nucleotide
  modified_base 14: mod_base = OTHER; note = 2'-O-methyl modified nucleotide
  modified_base 15: mod_base = OTHER; note = 2'-O-methyl modified nucleotide
  modified_base 16: mod_base = OTHER; note = 2'-O-methyl modified nucleotide
  modified_base 17: mod_base = OTHER; note = 2'-O-methyl modified nucleotide
  modified_base 18: mod_base = OTHER; note = 2'-O-methyl modified nucleotide
  modified_base 19: mod_base = OTHER; note = 2'-O-methyl modified nucleotide
caaggtgccctataaagga

SEQ ID NO: 808 - RNA, 19 nt, synthetic construct
  source 1..19: mol_type = other RNA
  modified_base 1: mod_base = OTHER; note = 2'-O-methyl modified nucleotide with phosphorothioate linkage
  modified_base 2: mod_base = OTHER; note = 2'-O-methyl modified nucleotide with phosphorothioate linkage
  modified_base 3: mod_base = OTHER; note = 2'-O-methyl modified nucleotide
  modified_base 4: mod_base = OTHER; note = 2'-O-methyl modified nucleotide
  modified_base 5: mod_base = OTHER; note = 2'-fluoro modified nucleotide
  modified_base 6: mod_base = OTHER; note = 2'-O-methyl modified nucleotide
  modified_base 7: mod_base = OTHER; note = 2'-fluoro modified nucleotide
  modified_base 8: mod_base = OTHER; note = 2'-fluoro modified nucleotide
  modified_base 9: mod_base = OTHER; note = 2'-fluoro modified nucleotide
  modified_base 10: mod_base = OTHER; note = 2'-O-methyl modified nucleotide
  modified_base 11: mod_base = OTHER; note = 2'-O-methyl modified nucleotide
  modified_base 12: mod_base = OTHER; note = 2'-O-methyl modified nucleotide
  modified_base 13: mod_base = OTHER; note = 2'-O-methyl modified nucleotide
  modified_base 14: mod_base = OTHER; note = 2'-O-methyl modified nucleotide
  modified_base 15: mod_base = OTHER; note = 2'-O-methyl modified nucleotide
  modified_base 16: mod_base = OTHER; note = 2'-O-methyl modified nucleotide
  modified_base 17: mod_base = OTHER; note = 2'-O-methyl modified nucleotide
  modified_base 18: mod_base = OTHER; note = 2'-O-methyl modified nucleotide
  modified_base 19: mod_base = OTHER; note = 2'-O-methyl modified nucleotide
atatatatgtttaacccaa

SEQ ID NO: 809 - RNA, 19 nt, synthetic construct
  source 1..19: mol_type = other RNA
  modified_base 1: mod_base = OTHER; note = 2'-O-methyl modified nucleotide with phosphorothioate linkage
  modified_base 2: mod_base = OTHER; note = 2'-O-methyl modified nucleotide with phosphorothioate linkage
  modified_base 3: mod_base = OTHER; note = 2'-O-methyl modified nucleotide
  modified_base 4: mod_base = OTHER; note = 2'-O-methyl modified nucleotide
  modified_base 5: mod_base = OTHER; note = 2'-fluoro modified nucleotide
  modified_base 6: mod_base = OTHER; note = 2'-O-methyl modified nucleotide
  modified_base 7: mod_base = OTHER; note = 2'-fluoro modified nucleotide
  modified_base 8: mod_base = OTHER; note = 2'-fluoro modified nucleotide
  modified_base 9: mod_base = OTHER; note = 2'-fluoro modified nucleotide
  modified_base 10: mod_base = OTHER; note = 2'-O-methyl modified nucleotide
  modified_base 11: mod_base = OTHER; note = 2'-O-methyl modified nucleotide
  modified_base 12: mod_base = OTHER; note = 2'-O-methyl modified nucleotide
  modified_base 13: mod_base = OTHER; note = 2'-O-methyl modified nucleotide
  modified_base 14: mod_base = OTHER; note = 2'-O-methyl modified nucleotide
  modified_base 15: mod_base = OTHER; note = 2'-O-methyl modified nucleotide
  modified_base 16: mod_base = OTHER; note = 2'-O-methyl modified nucleotide
  modified_base 17: mod_base = OTHER; note = 2'-O-methyl modified nucleotide
  modified_base 18: mod_base = OTHER; note = 2'-O-methyl modified nucleotide
  modified_base 19: mod_base = OTHER; note = 2'-O-methyl modified nucleotide
ggacaaggtgccctataaa

SEQ ID NO: 810 - RNA, 19 nt, synthetic construct
  source 1..19: mol_type = other RNA
  modified_base 1: mod_base = OTHER; note = 2'-O-methyl modified nucleotide with phosphorothioate linkage
  modified_base 2: mod_base = OTHER; note = 2'-O-methyl modified nucleotide with phosphorothioate linkage
  modified_base 3: mod_base = OTHER; note = 2'-O-methyl modified nucleotide
  modified_base 4: mod_base = OTHER; note = 2'-O-methyl modified nucleotide
  modified_base 5: mod_base = OTHER; note = 2'-fluoro modified nucleotide
  modified_base 6: mod_base = OTHER; note = 2'-O-methyl modified nucleotide
  modified_base 7: mod_base = OTHER; note = 2'-fluoro modified nucleotide
  modified_base 8: mod_base = OTHER; note = 2'-fluoro modified nucleotide
  modified_base 9: mod_base = OTHER; note = 2'-fluoro modified nucleotide
  modified_base 10: mod_base = OTHER; note = 2'-O-methyl modified nucleotide
  modified_base 11: mod_base = OTHER; note = 2'-O-methyl modified nucleotide
  modified_base 12: mod_base = OTHER; note = 2'-O-methyl modified nucleotide
  modified_base 13: mod_base = OTHER; note = 2'-O-methyl modified nucleotide
  modified_base 14: mod_base = OTHER; note = 2'-O-methyl modified nucleotide
  modified_base 15: mod_base = OTHER; note = 2'-O-methyl modified nucleotide
  modified_base 16: mod_base = OTHER; note = 2'-O-methyl modified nucleotide
  modified_base 17: mod_base = OTHER; note = 2'-O-methyl modified nucleotide
  modified_base 18: mod_base = OTHER; note = 2'-O-methyl modified nucleotide
  modified_base 19: mod_base = OTHER; note = 2'-O-methyl modified nucleotide
gtcatcaagggagggatga

SEQ ID NO: 811 - RNA, 19 nt, synthetic construct
  source 1..19: mol_type = other RNA
  modified_base 1: mod_base = OTHER; note = 2'-O-methyl modified nucleotide with phosphorothioate linkage
  modified_base 2: mod_base = OTHER; note = 2'-O-methyl modified nucleotide with phosphorothioate linkage
  modified_base 3: mod_base = OTHER; note = 2'-O-methyl modified nucleotide
  modified_base 4: mod_base = OTHER; note = 2'-O-methyl modified nucleotide
  modified_base 5: mod_base = OTHER; note = 2'-fluoro modified nucleotide
  modified_base 6: mod_base = OTHER; note = 2'-O-methyl modified nucleotide
  modified_base 7: mod_base = OTHER; note = 2'-fluoro modified nucleotide
  modified_base 8: mod_base = OTHER; note = 2'-fluoro modified nucleotide
  modified_base 9: mod_base = OTHER; note = 2'-fluoro modified nucleotide
  modified_base 10: mod_base = OTHER; note = 2'-O-methyl modified nucleotide
  modified_base 11: mod_base = OTHER; note = 2'-O-methyl modified nucleotide
  modified_base 12: mod_base = OTHER; note = 2'-O-methyl modified nucleotide
  modified_base 13: mod_base = OTHER; note = 2'-O-methyl modified nucleotide
  modified_base 14: mod_base = OTHER; note = 2'-O-methyl modified nucleotide
  modified_base 15: mod_base = OTHER; note = 2'-O-methyl modified nucleotide
  modified_base 16: mod_base = OTHER; note = 2'-O-methyl modified nucleotide
  modified_base 17: mod_base = OTHER; note = 2'-O-methyl modified nucleotide
  modified_base 18: mod_base = OTHER; note = 2'-O-methyl modified nucleotide
  modified_base 19: mod_base = OTHER; note = 2'-O-methyl modified nucleotide
catcatgctctcgctggga

SEQ ID NO: 812 - RNA, 19 nt, synthetic construct
  source 1..19: mol_type = other RNA
  modified_base 1: mod_base = OTHER; note = 2'-O-methyl modified nucleotide with phosphorothioate linkage
  modified_base 2: mod_base = OTHER; note = 2'-O-methyl modified nucleotide with phosphorothioate linkage
  modified_base 3: mod_base = OTHER; note = 2'-O-methyl modified nucleotide
  modified_base 4: mod_base = OTHER; note = 2'-O-methyl modified nucleotide
  modified_base 5: mod_base = OTHER; note = 2'-fluoro modified nucleotide
  modified_base 6: mod_base = OTHER; note = 2'-O-methyl modified nucleotide
  modified_base 7: mod_base = OTHER; note = 2'-fluoro modified nucleotide
  modified_base 8: mod_base = OTHER; note = 2'-fluoro modified nucleotide
  modified_base 9: mod_base = OTHER; note = 2'-fluoro modified nucleotide
  modified_base 10: mod_base = OTHER; note = 2'-O-methyl modified nucleotide
  modified_base 11: mod_base = OTHER; note = 2'-O-methyl modified nucleotide
  modified_base 12: mod_base = OTHER; note = 2'-O-methyl modified nucleotide
  modified_base 13: mod_base = OTHER; note = 2'-O-methyl modified nucleotide
  modified_base 14: mod_base = OTHER; note = 2'-O-methyl modified nucleotide
  modified_base 15: mod_base = OTHER; note = 2'-O-methyl modified nucleotide
  modified_base 16: mod_base = OTHER; note = 2'-O-methyl modified nucleotide
  modified_base 17: mod_base = OTHER; note = 2'-O-methyl modified nucleotide
  modified_base 18: mod_base = OTHER; note = 2'-O-methyl modified nucleotide
  modified_base 19: mod_base = OTHER; note = 2'-O-methyl modified nucleotide
ggagtggtcttccactgca

SEQ ID NO: 813 - RNA, 19 nt, synthetic construct
  source 1..19: mol_type = other RNA
  modified_base 1: mod_base = OTHER; note = 2'-O-methyl modified nucleotide with phosphorothioate linkage
  modified_base 2: mod_base = OTHER; note = 2'-O-methyl modified nucleotide with phosphorothioate linkage
  modified_base 3: mod_base = OTHER; note = 2'-O-methyl modified nucleotide
  modified_base 4: mod_base = OTHER; note = 2'-O-methyl modified nucleotide
  modified_base 5: mod_base = OTHER; note = 2'-fluoro modified nucleotide
  modified_base 6: mod_base = OTHER; note = 2'-O-methyl modified nucleotide
  modified_base 7: mod_base = OTHER; note = 2'-fluoro modified nucleotide
  modified_base 8: mod_base = OTHER; note = 2'-fluoro modified nucleotide
  modified_base 9: mod_base = OTHER; note = 2'-fluoro modified nucleotide
  modified_base 10: mod_base = OTHER; note = 2'-O-methyl modified nucleotide
  modified_base 11: mod_base = OTHER; note = 2'-O-methyl modified nucleotide
  modified_base 12: mod_base = OTHER; note = 2'-O-methyl modified nucleotide
  modified_base 13: mod_base = OTHER; note = 2'-O-methyl modified nucleotide
  modified_base 14: mod_base = OTHER; note = 2'-O-methyl modified nucleotide
  modified_base 15: mod_base = OTHER; note = 2'-O-methyl modified nucleotide
  modified_base 16: mod_base = OTHER; note = 2'-O-methyl modified nucleotide
  modified_base 17: mod_base = OTHER; note = 2'-O-methyl modified nucleotide
  modified_base 18: mod_base = OTHER; note = 2'-O-methyl modified nucleotide
  modified_base 19: mod_base = OTHER; note = 2'-O-methyl modified nucleotide
atgtcttcagtctggccaa

SEQ ID NO: 814 - RNA, 19 nt, synthetic construct
  source 1..19: mol_type = other RNA
  modified_base 1: mod_base = OTHER; note = 2'-O-methyl modified nucleotide with phosphorothioate linkage
  modified_base 2: mod_base = OTHER; note = 2'-O-methyl modified nucleotide with phosphorothioate linkage
  modified_base 3: mod_base = OTHER; note = 2'-O-methyl modified nucleotide
  modified_base 4: mod_base = OTHER; note = 2'-O-methyl modified nucleotide
  modified_base 5: mod_base = OTHER; note = 2'-fluoro modified nucleotide
  modified_base 6: mod_base = OTHER; note = 2'-O-methyl modified nucleotide
  modified_base 7: mod_base = OTHER; note = 2'-fluoro modified nucleotide
  modified_base 8: mod_base = OTHER; note = 2'-fluoro modified nucleotide
  modified_base 9: mod_base = OTHER; note = 2'-fluoro modified nucleotide
  modified_base 10: mod_base = OTHER; note = 2'-O-methyl modified nucleotide
  modified_base 11: mod_base = OTHER; note = 2'-O-methyl modified nucleotide
  modified_base 12: mod_base = OTHER; note = 2'-O-methyl modified nucleotide
  modified_base 13: mod_base = OTHER; note = 2'-O-methyl modified nucleotide
  modified_base 14: mod_base = OTHER; note = 2'-O-methyl modified nucleotide
  modified_base 15: mod_base = OTHER; note = 2'-O-methyl modified nucleotide
  modified_base 16: mod_base = OTHER; note = 2'-O-methyl modified nucleotide
  modified_base 17: mod_base = OTHER; note = 2'-O-methyl modified nucleotide
  modified_base 18: mod_base = OTHER; note = 2'-O-methyl modified nucleotide
  modified_base 19: mod_base = OTHER; note = 2'-O-methyl modified nucleotide
accatagggatcgtcctca

SEQ ID NO: 815 - RNA, 19 nt, synthetic construct
  source 1..19: mol_type = other RNA
  modified_base 1: mod_base = OTHER; note = 2'-O-methyl modified nucleotide with phosphorothioate linkage
  modified_base 2: mod_base = OTHER; note = 2'-O-methyl modified nucleotide with phosphorothioate linkage
  modified_base 3: mod_base = OTHER; note = 2'-O-methyl modified nucleotide
  modified_base 4: mod_base = OTHER; note = 2'-O-methyl modified nucleotide
  modified_base 5: mod_base = OTHER; note = 2'-fluoro modified nucleotide
  modified_base 6: mod_base = OTHER; note = 2'-O-methyl modified nucleotide
  modified_base 7: mod_base = OTHER; note = 2'-fluoro modified nucleotide
  modified_base 8: mod_base = OTHER; note = 2'-fluoro modified nucleotide
  modified_base 9: mod_base = OTHER; note = 2'-fluoro modified nucleotide
  modified_base 10: mod_base = OTHER; note = 2'-O-methyl modified nucleotide
  modified_base 11: mod_base = OTHER; note = 2'-O-methyl modified nucleotide
  modified_base 12: mod_base = OTHER; note = 2'-O-methyl modified nucleotide
  modified_base 13: mod_base = OTHER; note = 2'-O-methyl modified nucleotide
  modified_base 14: mod_base = OTHER; note = 2'-O-methyl modified nucleotide
  modified_base 15: mod_base = OTHER; note = 2'-O-methyl modified nucleotide
  modified_base 16: mod_base = OTHER; note = 2'-O-methyl modified nucleotide
  modified_base 17: mod_base = OTHER; note = 2'-O-methyl modified nucleotide
  modified_base 18: mod_base = OTHER; note = 2'-O-methyl modified nucleotide
  modified_base 19: mod_base = OTHER; note = 2'-O-methyl modified nucleotide
tggctttctgctgggttaa

SEQ ID NO: 816 - RNA, 19 nt, synthetic construct
  source 1..19: mol_type = other RNA
  modified_base 1: mod_base = OTHER; note = 2'-O-methyl modified nucleotide with phosphorothioate linkage
  modified_base 2: mod_base = OTHER; note = 2'-O-methyl modified nucleotide with phosphorothioate linkage
  modified_base 3: mod_base = OTHER; note = 2'-O-methyl modified nucleotide
  modified_base 4: mod_base = OTHER; note = 2'-O-methyl modified nucleotide
  modified_base 5: mod_base = OTHER; note = 2'-fluoro modified nucleotide
  modified_base 6: mod_base = OTHER; note = 2'-O-methyl modified nucleotide
  modified_base 7: mod_base = OTHER; note = 2'-fluoro modified nucleotide
  modified_base 8: mod_base = OTHER; note = 2'-fluoro modified nucleotide
  modified_base 9: mod_base = OTHER; note = 2'-fluoro modified nucleotide
  modified_base 10: mod_base = OTHER; note = 2'-O-methyl modified nucleotide
  modified_base 11: mod_base = OTHER; note = 2'-O-methyl modified nucleotide
  modified_base 12: mod_base = OTHER; note = 2'-O-methyl modified nucleotide
  modified_base 13: mod_base = OTHER; note = 2'-O-methyl modified nucleotide
  modified_base 14: mod_base = OTHER; note = 2'-O-methyl modified nucleotide
  modified_base 15: mod_base = OTHER; note = 2'-O-methyl modified nucleotide
  modified_base 16: mod_base = OTHER; note = 2'-O-methyl modified nucleotide
  modified_base 17: mod_base = OTHER; note = 2'-O-methyl modified nucleotide
  modified_base 18: mod_base = OTHER; note = 2'-O-methyl modified nucleotide
  modified_base 19: mod_base = OTHER; note = 2'-O-methyl modified nucleotide
cttgtgcagtgtggccgta

SEQ ID NO: 817 - RNA, 19 nt, synthetic construct
  source 1..19: mol_type = other RNA
  modified_base 1: mod_base = OTHER; note = 2'-O-methyl modified nucleotide with phosphorothioate linkage
  modified_base 2: mod_base = OTHER; note = 2'-O-methyl modified nucleotide with phosphorothioate linkage
  modified_base 3: mod_base = OTHER; note = 2'-O-methyl modified nucleotide
  modified_base 4: mod_base = OTHER; note = 2'-O-methyl modified nucleotide
  modified_base 5: mod_base = OTHER; note = 2'-fluoro modified nucleotide
  modified_base 6: mod_base = OTHER; note = 2'-O-methyl modified nucleotide
  modified_base 7: mod_base = OTHER; note = 2'-fluoro modified nucleotide
  modified_base 8: mod_base = OTHER; note = 2'-fluoro modified nucleotide
  modified_base 9: mod_base = OTHER; note = 2'-fluoro modified nucleotide
  modified_base 10: mod_base = OTHER; note = 2'-O-methyl modified nucleotide
  modified_base 11: mod_base = OTHER; note = 2'-O-methyl modified nucleotide
  modified_base 12: mod_base = OTHER; note = 2'-O-methyl modified nucleotide
  modified_base 13: mod_base = OTHER; note = 2'-O-methyl modified nucleotide
  modified_base 14: mod_base = OTHER; note = 2'-O-methyl modified nucleotide
  modified_base 15: mod_base = OTHER; note = 2'-O-methyl modified nucleotide
  modified_base 16: mod_base = OTHER; note = 2'-O-methyl modified nucleotide
  modified_base 17: mod_base = OTHER; note = 2'-O-methyl modified nucleotide
  modified_base 18: mod_base = OTHER; note = 2'-O-methyl modified nucleotide
  modified_base 19: mod_base = OTHER; note = 2'-O-methyl modified nucleotide
agtgtggccgtcacagtta

SEQ ID NO: 818 - RNA, 19 nt, synthetic construct
  source 1..19: mol_type = other RNA
  modified_base 1: mod_base = OTHER; note = 2'-O-methyl modified nucleotide with phosphorothioate linkage
  modified_base 2: mod_base = OTHER; note = 2'-O-methyl modified nucleotide with phosphorothioate linkage
  modified_base 3: mod_base = OTHER; note = 2'-O-methyl modified nucleotide
  modified_base 4: mod_base = OTHER; note = 2'-O-methyl modified nucleotide
  modified_base 5: mod_base = OTHER; note = 2'-fluoro modified nucleotide
  modified_base 6: mod_base = OTHER; note = 2'-O-methyl modified nucleotide
  modified_base 7: mod_base = OTHER; note = 2'-fluoro modified nucleotide
  modified_base 8: mod_base = OTHER; note = 2'-fluoro modified nucleotide
  modified_base 9: mod_base = OTHER; note = 2'-fluoro modified nucleotide
  modified_base 10: mod_base = OTHER; note = 2'-O-methyl modified nucleotide
  modified_base 11: mod_base = OTHER; note = 2'-O-methyl modified nucleotide
  modified_base 12: mod_base = OTHER; note = 2'-O-methyl modified nucleotide
  modified_base 13: mod_base = OTHER; note = 2'-O-methyl modified nucleotide
  modified_base 14: mod_base = OTHER; note = 2'-O-methyl modified nucleotide
  modified_base 15: mod_base = OTHER; note = 2'-O-methyl modified nucleotide
  modified_base 16: mod_base = OTHER; note = 2'-O-methyl modified nucleotide
  modified_base 17: mod_base = OTHER; note = 2'-O-methyl modified nucleotide
  modified_base 18: mod_base = OTHER; note = 2'-O-methyl modified nucleotide
  modified_base 19: mod_base = OTHER; note = 2'-O-methyl modified nucleotide
tgcaccatagggatcgtca

SEQ ID NO: 819 - RNA, 19 nt, synthetic construct
  source 1..19: mol_type = other RNA
  modified_base 1: mod_base = OTHER; note = 2'-O-methyl modified nucleotide with phosphorothioate linkage
  modified_base 2: mod_base = OTHER; note = 2'-O-methyl modified nucleotide with phosphorothioate linkage
  modified_base 3: mod_base = OTHER; note = 2'-O-methyl modified nucleotide
  modified_base 4: mod_base = OTHER; note = 2'-O-methyl modified nucleotide
  modified_base 5: mod_base = OTHER; note = 2'-fluoro modified nucleotide
  modified_base 6: mod_base = OTHER; note = 2'-O-methyl modified nucleotide
  modified_base 7: mod_base = OTHER; note = 2'-fluoro modified nucleotide
  modified_base 8: mod_base = OTHER; note = 2'-fluoro modified nucleotide
  modified_base 9: mod_base = OTHER; note = 2'-fluoro modified nucleotide
  modified_base 10: mod_base = OTHER; note = 2'-O-methyl modified nucleotide
  modified_base 11: mod_base = OTHER; note = 2'-O-methyl modified nucleotide
  modified_base 12: mod_base = OTHER; note = 2'-O-methyl modified nucleotide
  modified_base 13: mod_base = OTHER; note = 2'-O-methyl modified nucleotide
  modified_base 14: mod_base = OTHER; note = 2'-O-methyl modified nucleotide
  modified_base 15: mod_base = OTHER; note = 2'-O-methyl modified nucleotide
  modified_base 16: mod_base = OTHER; note = 2'-O-methyl modified nucleotide
  modified_base 17: mod_base = OTHER; note = 2'-O-methyl modified nucleotide
  modified_base 18: mod_base = OTHER; note = 2'-O-methyl modified nucleotide
  modified_base 19: mod_base = OTHER; note = 2'-O-methyl modified nucleotide
gctcacttatggaagccta

SEQ ID NO: 820 - RNA, 19 nt, synthetic construct
  source 1..19: mol_type = other RNA
  modified_base 1: mod_base = OTHER; note = 2'-O-methyl modified nucleotide with phosphorothioate linkage
  modified_base 2: mod_base = OTHER; note = 2'-O-methyl modified nucleotide with phosphorothioate linkage
  modified_base 3: mod_base = OTHER; note = 2'-O-methyl modified nucleotide
  modified_base 4: mod_base = OTHER; note = 2'-O-methyl modified nucleotide
  modified_base 5: mod_base = OTHER; note = 2'-fluoro modified nucleotide
  modified_base 6: mod_base = OTHER; note = 2'-O-methyl modified nucleotide
  modified_base 7: mod_base = OTHER; note = 2'-fluoro modified nucleotide
  modified_base 8: mod_base = OTHER; note = 2'-fluoro modified nucleotide
  modified_base 9: mod_base = OTHER; note = 2'-fluoro modified nucleotide
  modified_base 10: mod_base = OTHER; note = 2'-O-methyl modified nucleotide
  modified_base 11: mod_base = OTHER; note = 2'-O-methyl modified nucleotide
  modified_base 12: mod_base = OTHER; note = 2'-O-methyl modified nucleotide
  modified_base 13: mod_base = OTHER; note = 2'-O-methyl modified nucleotide
  modified_base 14: mod_base = OTHER; note = 2'-O-methyl modified nucleotide
  modified_base 15: mod_base = OTHER; note = 2'-O-methyl modified nucleotide
  modified_base 16: mod_base = OTHER; note = 2'-O-methyl modified nucleotide
  modified_base 17: mod_base = OTHER; note = 2'-O-methyl modified nucleotide
  modified_base 18: mod_base = OTHER; note = 2'-O-methyl modified nucleotide
  modified_base 19: mod_base = OTHER; note = 2'-O-methyl modified nucleotide
caccatagggatcgtccta

SEQ ID NO: 821 - RNA, 19 nt, synthetic construct
  source 1..19: mol_type = other RNA
  modified_base 1: mod_base = OTHER; note = 2'-O-methyl modified nucleotide with phosphorothioate linkage
  modified_base 2: mod_base = OTHER; note = 2'-O-methyl modified nucleotide with phosphorothioate linkage
  modified_base 3: mod_base = OTHER; note = 2'-O-methyl modified nucleotide
  modified_base 4: mod_base = OTHER; note = 2'-O-methyl modified nucleotide
  modified_base 5: mod_base = OTHER; note = 2'-fluoro modified nucleotide
  modified_base 6: mod_base = OTHER; note = 2'-O-methyl modified nucleotide
  modified_base 7: mod_base = OTHER; note = 2'-fluoro modified nucleotide
  modified_base 8: mod_base = OTHER; note = 2'-fluoro modified nucleotide
  modified_base 9: mod_base = OTHER; note = 2'-fluoro modified nucleotide
  modified_base 10: mod_base = OTHER; note = 2'-O-methyl modified nucleotide
  modified_base 11: mod_base = OTHER; note = 2'-O-methyl modified nucleotide
  modified_base 12: mod_base = OTHER; note = 2'-O-methyl modified nucleotide
  modified_base 13: mod_base = OTHER; note = 2'-O-methyl modified nucleotide
  modified_base 14: mod_base = OTHER; note = 2'-O-methyl modified nucleotide
  modified_base 15: mod_base = OTHER; note = 2'-O-methyl modified nucleotide
  modified_base 16: mod_base = OTHER; note = 2'-O-methyl modified nucleotide
  modified_base 17: mod_base = OTHER; note = 2'-O-methyl modified nucleotide
  modified_base 18: mod_base = OTHER; note = 2'-O-methyl modified nucleotide
  modified_base 19: mod_base = OTHER; note = 2'-O-methyl modified nucleotide
cccctcctctacatgatta

SEQ ID NO: 822 - RNA, 19 nt, synthetic construct
  source 1..19: mol_type = other RNA
  modified_base 1: mod_base = OTHER; note = 2'-O-methyl modified nucleotide with phosphorothioate linkage
  modified_base 2: mod_base = OTHER; note = 2'-O-methyl modified nucleotide with phosphorothioate linkage
  modified_base 3: mod_base = OTHER; note = 2'-O-methyl modified nucleotide
  modified_base 4: mod_base = OTHER; note = 2'-O-methyl modified nucleotide
  modified_base 5: mod_base = OTHER; note = 2'-fluoro modified nucleotide
  modified_base 6: mod_base = OTHER; note = 2'-O-methyl modified nucleotide
  modified_base 7: mod_base = OTHER; note = 2'-fluoro modified nucleotide
  modified_base 8: mod_base = OTHER; note = 2'-fluoro modified nucleotide
  modified_base 9: mod_base = OTHER; note = 2'-fluoro modified nucleotide
  modified_base 10: mod_base = OTHER; note = 2'-O-methyl modified nucleotide
  modified_base 11: mod_base = OTHER; note = 2'-O-methyl modified nucleotide
  modified_base 12: mod_base = OTHER; note = 2'-O-methyl modified nucleotide
  modified_base 13: mod_base = OTHER; note = 2'-O-methyl modified nucleotide
  modified_base 14: mod_base = OTHER; note = 2'-O-methyl modified nucleotide
  modified_base 15: mod_base = OTHER; note = 2'-O-methyl modified nucleotide
  modified_base 16: mod_base = OTHER; note = 2'-O-methyl modified nucleotide
  modified_base 17: mod_base = OTHER; note = 2'-O-methyl modified nucleotide
  modified_base 18: mod_base = OTHER; note = 2'-O-methyl modified nucleotide
  modified_base 19: mod_base = OTHER; note = 2'-O-methyl modified nucleotide
ctccccttgcacagcctaa

SEQ ID NO: 823 - RNA, 19 nt, synthetic construct
  source 1..19: mol_type = other RNA
  modified_base 1: mod_base = OTHER; note = 2'-O-methyl modified nucleotide with phosphorothioate linkage
  modified_base 2: mod_base = OTHER; note = 2'-O-methyl modified nucleotide with phosphorothioate linkage
  modified_base 3: mod_base = OTHER; note = 2'-O-methyl modified nucleotide
  modified_base 4: mod_base = OTHER; note = 2'-O-methyl modified nucleotide
  modified_base 5: mod_base = OTHER; note = 2'-fluoro modified nucleotide
  modified_base 6: mod_base = OTHER; note = 2'-O-methyl modified nucleotide
  modified_base 7: mod_base = OTHER; note = 2'-fluoro modified nucleotide
  modified_base 8: mod_base = OTHER; note = 2'-fluoro modified nucleotide
  modified_base 9: mod_base = OTHER; note = 2'-fluoro modified nucleotide
  modified_base 10: mod_base = OTHER; note = 2'-O-methyl modified nucleotide
  modified_base 11: mod_base = OTHER; note = 2'-O-methyl modified nucleotide
  modified_base 12: mod_base = OTHER; note = 2'-O-methyl modified nucleotide
  modified_base 13: mod_base = OTHER; note = 2'-O-methyl modified nucleotide
  modified_base 14: mod_base = OTHER; note = 2'-O-methyl modified nucleotide
  modified_base 15: mod_base = OTHER; note = 2'-O-methyl modified nucleotide
  modified_base 16: mod_base = OTHER; note = 2'-O-methyl modified nucleotide
  modified_base 17: mod_base = OTHER; note = 2'-O-methyl modified nucleotide
  modified_base 18: mod_base = OTHER; note = 2'-O-methyl modified nucleotide
  modified_base 19: mod_base = OTHER; note = 2'-O-methyl modified nucleotide
caaacggccacaatacata

SEQ ID NO: 824 - RNA, 19 nt, synthetic construct
  source 1..19: mol_type = other RNA
  modified_base 1: mod_base = OTHER; note = 2'-O-methyl modified nucleotide with phosphorothioate linkage
  modified_base 2: mod_base = OTHER; note = 2'-O-methyl modified nucleotide with phosphorothioate linkage
  modified_base 3: mod_base = OTHER; note = 2'-O-methyl modified nucleotide
  modified_base 4: mod_base = OTHER; note = 2'-O-methyl modified nucleotide
  modified_base 5: mod_base = OTHER; note = 2'-fluoro modified nucleotide
  modified_base 6: mod_base = OTHER; note = 2'-O-methyl modified nucleotide
  modified_base 7: mod_base = OTHER; note = 2'-fluoro modified nucleotide
  modified_base 8: mod_base = OTHER; note = 2'-fluoro modified nucleotide
  modified_base 9: mod_base = OTHER; note = 2'-fluoro modified nucleotide
  modified_base 10: mod_base = OTHER; note = 2'-O-methyl modified nucleotide
  modified_base 11: mod_base = OTHER; note = 2'-O-methyl modified nucleotide
  modified_base 12: mod_base = OTHER; note = 2'-O-methyl modified nucleotide
  modified_base 13: mod_base = OTHER; note = 2'-O-methyl modified nucleotide
  modified_base 14: mod_base = OTHER; note = 2'-O-methyl modified nucleotide
  modified_base 15: mod_base = OTHER; note = 2'-O-methyl modified nucleotide
  modified_base 16: mod_base = OTHER; note = 2'-O-methyl modified nucleotide
  modified_base 17: mod_base = OTHER; note = 2'-O-methyl modified nucleotide
  modified_base 18: mod_base = OTHER; note = 2'-O-methyl modified nucleotide
  modified_base 19: mod_base = OTHER; note = 2'-O-methyl modified nucleotide
tgatgccttttattggcta

SEQ ID NO: 825 - RNA, 19 nt, synthetic construct
  source 1..19: mol_type = other RNA
  modified_base 1: mod_base = OTHER; note = 2'-O-methyl modified nucleotide with phosphorothioate linkage
  modified_base 2: mod_base = OTHER; note = 2'-O-methyl modified nucleotide with phosphorothioate linkage
  modified_base 3: mod_base = OTHER; note = 2'-O-methyl modified nucleotide
  modified_base 4: mod_base = OTHER; note = 2'-O-methyl modified nucleotide
  modified_base 5: mod_base = OTHER; note = 2'-fluoro modified nucleotide
  modified_base 6: mod_base = OTHER; note = 2'-O-methyl modified nucleotide
  modified_base 7: mod_base = OTHER; note = 2'-fluoro modified nucleotide
  modified_base 8: mod_base = OTHER; note = 2'-fluoro modified nucleotide
  modified_base 9: mod_base = OTHER; note = 2'-fluoro modified nucleotide
  modified_base 10: mod_base = OTHER; note = 2'-O-methyl modified nucleotide
  modified_base 11: mod_base = OTHER; note = 2'-O-methyl modified nucleotide
  modified_base 12: mod_base = OTHER; note = 2'-O-methyl modified nucleotide
  modified_base 13: mod_base = OTHER; note = 2'-O-methyl modified nucleotide
  modified_base 14: mod_base = OTHER; note = 2'-O-methyl modified nucleotide
  modified_base 15: mod_base = OTHER; note = 2'-O-methyl modified nucleotide
  modified_base 16: mod_base = OTHER; note = 2'-O-methyl modified nucleotide
  modified_base 17: mod_base = OTHER; note = 2'-O-methyl modified nucleotide
  modified_base 18: mod_base = OTHER; note = 2'-O-methyl modified nucleotide
  modified_base 19: mod_base = OTHER; note = 2'-O-methyl modified nucleotide
ttgcaccatagggatcgta

SEQ ID NO: 826 - RNA, 19 nt, synthetic construct
  source 1..19: mol_type = other RNA
  modified_base 1: mod_base = OTHER; note = 2'-O-methyl modified nucleotide with phosphorothioate linkage
  modified_base 2: mod_base = OTHER; note = 2'-O-methyl modified nucleotide with phosphorothioate linkage
  modified_base 3: mod_base = OTHER; note = 2'-O-methyl modified nucleotide
  modified_base 4: mod_base = OTHER; note = 2'-O-methyl modified nucleotide
  modified_base 5: mod_base = OTHER; note = 2'-fluoro modified nucleotide
  modified_base 6: mod_base = OTHER; note = 2'-O-methyl modified nucleotide
  modified_base 7: mod_base = OTHER; note = 2'-fluoro modified nucleotide
  modified_base 8: mod_base = OTHER; note = 2'-fluoro modified nucleotide
  modified_base 9: mod_base = OTHER; note = 2'-fluoro modified nucleotide
  modified_base 10: mod_base = OTHER; note = 2'-O-methyl modified nucleotide
  modified_base 11: mod_base = OTHER; note = 2'-O-methyl modified nucleotide
  modified_base 12: mod_base = OTHER; note = 2'-O-methyl modified nucleotide
  modified_base 13: mod_base = OTHER; note = 2'-O-methyl modified nucleotide
  modified_base 14: mod_base = OTHER; note = 2'-O-methyl modified nucleotide
  modified_base 15: mod_base = OTHER; note = 2'-O-methyl modified nucleotide
  modified_base 16: mod_base = OTHER; note = 2'-O-methyl modified nucleotide
  modified_base 17: mod_base = OTHER; note = 2'-O-methyl modified nucleotide
  modified_base 18: mod_base = OTHER; note = 2'-O-methyl modified nucleotide
  modified_base 19: mod_base = OTHER; note = 2'-O-methyl modified nucleotide
aaggagtggtcttccacta

SEQ ID NO: 827 - RNA, 19 nt, synthetic construct
  source 1..19: mol_type = other RNA
  modified_base 1: mod_base = OTHER; note = 2'-O-methyl modified nucleotide with phosphorothioate linkage
  modified_base 2: mod_base = OTHER; note = 2'-O-methyl modified nucleotide with phosphorothioate linkage
  modified_base 3: mod_base = OTHER; note = 2'-O-methyl modified nucleotide
  modified_base 4: mod_base = OTHER; note = 2'-O-methyl modified nucleotide
  modified_base 5: mod_base = OTHER; note = 2'-fluoro modified nucleotide
  modified_base 6: mod_base = OTHER; note = 2'-O-methyl modified nucleotide
  modified_base 7: mod_base = OTHER; note = 2'-fluoro modified nucleotide
  modified_base 8: mod_base = OTHER; note = 2'-fluoro modified nucleotide
  modified_base 9: mod_base = OTHER; note = 2'-fluoro modified nucleotide
  modified_base 10: mod_base = OTHER; note = 2'-O-methyl modified nucleotide
  modified_base 11: mod_base = OTHER; note = 2'-O-methyl modified nucleotide
  modified_base 12: mod_base = OTHER; note = 2'-O-methyl modified nucleotide
  modified_base 13: mod_base = OTHER; note = 2'-O-methyl modified nucleotide
  modified_base 14: mod_base = OTHER; note = 2'-O-methyl modified nucleotide
  modified_base 15: mod_base = OTHER; note = 2'-O-methyl modified nucleotide
  modified_base 16: mod_base = OTHER; note = 2'-O-methyl modified nucleotide
  modified_base 17: mod_base = OTHER; note = 2'-O-methyl modified nucleotide
  modified_base 18: mod_base = OTHER; note = 2'-O-methyl modified nucleotide
  modified_base 19: mod_base = OTHER; note = 2'-O-methyl modified nucleotide
catgtttgccatgacacca

SEQ ID NO: 828 - RNA, 19 nt, synthetic construct
  source 1..19: mol_type = other RNA
  modified_base 1: mod_base = OTHER; note = 2'-O-methyl modified nucleotide with phosphorothioate linkage
  modified_base 2: mod_base = OTHER; note = 2'-O-methyl modified nucleotide with phosphorothioate linkage
  modified_base 3: mod_base = OTHER; note = 2'-O-methyl modified nucleotide
  modified_base 4: mod_base = OTHER; note = 2'-O-methyl modified nucleotide
  modified_base 5: mod_base = OTHER; note = 2'-fluoro modified nucleotide
  modified_base 6: mod_base = OTHER; note = 2'-O-methyl modified nucleotide
  modified_base 7: mod_base = OTHER; note = 2'-fluoro modified nucleotide
  modified_base 8: mod_base = OTHER; note = 2'-fluoro modified nucleotide
  modified_base 9: mod_base = OTHER; note = 2'-fluoro modified nucleotide
  modified_base 10: mod_base = OTHER; note = 2'-O-methyl modified nucleotide
  modified_base 11: mod_base = OTHER; note = 2'-O-methyl modified nucleotide
  modified_base 12: mod_base = OTHER; note = 2'-O-methyl modified nucleotide
  modified_base 13: mod_base = OTHER; note = 2'-O-methyl modified nucleotide
  modified_base 14: mod_base = OTHER; note = 2'-O-methyl modified nucleotide
  modified_base 15: mod_base = OTHER; note = 2'-O-methyl modified nucleotide
  modified_base 16: mod_base = OTHER; note = 2'-O-methyl modified nucleotide
  modified_base 17: mod_base = OTHER; note = 2'-O-methyl modified nucleotide
  modified_base 18: mod_base = OTHER; note = 2'-O-methyl modified nucleotide
  modified_base 19: mod_base = OTHER; note = 2'-O-methyl modified nucleotide
acatgcgctatgtcatcaa

SEQ ID NO: 829 - RNA, 19 nt, synthetic construct
  source 1..19: mol_type = other RNA
  modified_base 1: mod_base = OTHER; note = 2'-O-methyl modified nucleotide with phosphorothioate linkage
  modified_base 2: mod_base = OTHER; note = 2'-O-methyl modified nucleotide with phosphorothioate linkage
  modified_base 3: mod_base = OTHER; note = 2'-O-methyl modified nucleotide
  modified_base 4: mod_base = OTHER; note = 2'-O-methyl modified nucleotide
  modified_base 5: mod_base = OTHER; note = 2'-fluoro modified nucleotide
  modified_base 6: mod_base = OTHER; note = 2'-O-methyl modified nucleotide
  modified_base 7: mod_base = OTHER; note = 2'-fluoro modified nucleotide
  modified_base 8: mod_base = OTHER; note = 2'-fluoro modified nucleotide
  modified_base 9: mod_base = OTHER; note = 2'-fluoro modified nucleotide
  modified_base 10: mod_base = OTHER; note = 2'-O-methyl modified nucleotide
  modified_base 11: mod_base = OTHER; note = 2'-O-methyl modified nucleotide
  modified_base 12: mod_base = OTHER; note = 2'-O-methyl modified nucleotide
  modified_base 13: mod_base = OTHER; note = 2'-O-methyl modified nucleotide
  modified_base 14: mod_base = OTHER; note = 2'-O-methyl modified nucleotide
  modified_base 15: mod_base = OTHER; note = 2'-O-methyl modified nucleotide
  modified_base 16: mod_base = OTHER; note = 2'-O-methyl modified nucleotide
  modified_base 17: mod_base = OTHER; note = 2'-O-methyl modified nucleotide
  modified_base 18: mod_base = OTHER; note = 2'-O-methyl modified nucleotide
  modified_base 19: mod_base = OTHER; note = 2'-O-methyl modified nucleotide
ggatggaggcccacaacga

SEQ ID NO: 830 - RNA, 19 nt, synthetic construct
  source 1..19: mol_type = other RNA
  modified_base 1: mod_base = OTHER; note = 2'-O-methyl modified nucleotide with phosphorothioate linkage
  modified_base 2: mod_base = OTHER; note = 2'-O-methyl modified nucleotide with phosphorothioate linkage
  modified_base 3: mod_base = OTHER; note = 2'-O-methyl modified nucleotide
  modified_base 4: mod_base = OTHER; note = 2'-O-methyl modified nucleotide
  modified_base 5: mod_base = OTHER; note = 2'-fluoro modified nucleotide
  modified_base 6: mod_base = OTHER; note = 2'-O-methyl modified nucleotide
  modified_base 7: mod_base = OTHER; note = 2'-fluoro modified nucleotide
  modified_base 8: mod_base = OTHER; note = 2'-fluoro modified nucleotide
  modified_base 9: mod_base = OTHER; note = 2'-fluoro modified nucleotide
  modified_base 10: mod_base = OTHER; note = 2'-O-methyl modified nucleotide
  modified_base 11: mod_base = OTHER; note = 2'-O-methyl modified nucleotide
  modified_base 12: mod_base = OTHER; note = 2'-O-methyl modified nucleotide
  modified_base 13: mod_base = OTHER; note = 2'-O-methyl modified nucleotide
  modified_base 14: mod_base = OTHER; note = 2'-O-methyl modified nucleotide
  modified_base 15: mod_base = OTHER; note = 2'-O-methyl modified nucleotide
  modified_base 16: mod_base = OTHER; note = 2'-O-methyl modified nucleotide
  modified_base 17: mod_base = OTHER; note = 2'-O-methyl modified nucleotide
  modified_base 18: mod_base = OTHER; note = 2'-O-methyl modified nucleotide
  modified_base 19: mod_base = OTHER; note = 2'-O-methyl modified nucleotide
gccctggtggcacagtata

SEQ ID NO: 831 - RNA, 19 nt, synthetic construct
  source 1..19: mol_type = other RNA
  modified_base 1: mod_base = OTHER; note = 2'-O-methyl modified nucleotide with phosphorothioate linkage
  modified_base 2: mod_base = OTHER; note = 2'-O-methyl modified nucleotide with phosphorothioate linkage
  modified_base 3: mod_base = OTHER; note = 2'-O-methyl modified nucleotide
  modified_base 4: mod_base = OTHER; note = 2'-O-methyl modified nucleotide
  modified_base 5: mod_base = OTHER; note = 2'-fluoro modified nucleotide
  modified_base 6: mod_base = OTHER; note = 2'-O-methyl modified nucleotide
  modified_base 7: mod_base = OTHER; note = 2'-fluoro modified nucleotide
  modified_base 8: mod_base = OTHER; note = 2'-fluoro modified nucleotide
  modified_base 9: mod_base = OTHER; note = 2'-fluoro modified nucleotide
  modified_base 10: mod_base = OTHER; note = 2'-O-methyl modified nucleotide
  modified_base 11: mod_base = OTHER; note = 2'-O-methyl modified nucleotide
  modified_base 12: mod_base = OTHER; note = 2'-O-methyl modified nucleotide
  modified_base 13: mod_base = OTHER; note = 2'-O-methyl modified nucleotide
  modified_base 14: mod_base = OTHER; note = 2'-O-methyl modified nucleotide
  modified_base 15: mod_base = OTHER; note = 2'-O-methyl modified nucleotide
  modified_base 16: mod_base = OTHER; note = 2'-O-methyl modified nucleotide
  modified_base 17: mod_base = OTHER; note = 2'-O-methyl modified nucleotide
  modified_base 18: mod_base = OTHER; note = 2'-O-methyl modified nucleotide
  modified_base 19: mod_base = OTHER; note = 2'-O-methyl modified nucleotide
aagggagggatgatcatca

SEQ ID NO: 832 - RNA, 19 nt, synthetic construct
  source 1..19: mol_type = other RNA
  modified_base 1: mod_base = OTHER; note = 2'-O-methyl modified nucleotide with phosphorothioate linkage
  modified_base 2: mod_base = OTHER; note = 2'-O-methyl modified nucleotide with phosphorothioate linkage
  modified_base 3: mod_base = OTHER; note = 2'-O-methyl modified nucleotide
  modified_base 4: mod_base = OTHER; note = 2'-O-methyl modified nucleotide
  modified_base 5: mod_base = OTHER; note = 2'-fluoro modified nucleotide
  modified_base 6: mod_base = OTHER; note = 2'-O-methyl modified nucleotide
  modified_base 7: mod_base = OTHER; note = 2'-fluoro modified nucleotide
  modified_base 8: mod_base = OTHER; note = 2'-fluoro modified nucleotide
  modified_base 9: mod_base = OTHER; note = 2'-fluoro modified nucleotide
  modified_base 10: mod_base = OTHER; note = 2'-O-methyl modified nucleotide
  modified_base 11: mod_base = OTHER; note = 2'-O-methyl modified nucleotide
  modified_base 12: mod_base = OTHER; note = 2'-O-methyl modified nucleotide
  modified_base 13: mod_base = OTHER; note = 2'-O-methyl modified nucleotide
  modified_base 14: mod_base = OTHER; note = 2'-O-methyl modified nucleotide
  modified_base 15: mod_base = OTHER; note = 2'-O-methyl modified nucleotide
  modified_base 16: mod_base = OTHER; note = 2'-O-methyl modified nucleotide
  modified_base 17: mod_base = OTHER; note = 2'-O-methyl modified nucleotide
  modified_base 18: mod_base = OTHER; note = 2'-O-methyl modified nucleotide
  modified_base 19: mod_base = OTHER; note = 2'-O-methyl modified nucleotide
atttccagtacatctatca

SEQ ID NO: 833 - RNA, 19 nt, synthetic construct
  source 1..19: mol_type = other RNA
  modified_base 1: mod_base = OTHER; note = 2'-O-methyl modified nucleotide with phosphorothioate linkage
  modified_base 2: mod_base = OTHER; note = 2'-O-methyl modified nucleotide with phosphorothioate linkage
  modified_base 3: mod_base = OTHER; note = 2'-O-methyl modified nucleotide
  modified_base 4: mod_base = OTHER; note = 2'-O-methyl modified nucleotide
  modified_base 5: mod_base = OTHER; note = 2'-fluoro modified nucleotide
  modified_base 6: mod_base = OTHER; note = 2'-O-methyl modified nucleotide
  modified_base 7: mod_base = OTHER; note = 2'-fluoro modified nucleotide
  modified_base 8: mod_base = OTHER; note = 2'-fluoro modified nucleotide
  modified_base 9: mod_base = OTHER; note = 2'-fluoro modified nucleotide
  modified_base 10: mod_base = OTHER; note = 2'-O-methyl modified nucleotide
  modified_base 11: mod_base = OTHER; note = 2'-O-methyl modified nucleotide
  modified_base 12: mod_base = OTHER; note = 2'-O-methyl modified nucleotide
  modified_base 13: mod_base = OTHER; note = 2'-O-methyl modified nucleotide
  modified_base 14: mod_base = OTHER; note = 2'-O-methyl modified nucleotide
  modified_base 15: mod_base = OTHER; note = 2'-O-methyl modified nucleotide
  modified_base 16: mod_base = OTHER; note = 2'-O-methyl modified nucleotide
  modified_base 17: mod_base = OTHER; note = 2'-O-methyl modified nucleotide
  modified_base 18: mod_base = OTHER; note = 2'-O-methyl modified nucleotide
  modified_base 19: mod_base = OTHER; note = 2'-O-methyl modified nucleotide
aatacccaaatcccattca

SEQ ID NO: 834 - RNA, 19 nt, synthetic construct
  source 1..19: mol_type = other RNA
  modified_base 1: mod_base = OTHER; note = 2'-O-methyl modified nucleotide with phosphorothioate linkage
  modified_base 2: mod_base = OTHER; note = 2'-O-methyl modified nucleotide with phosphorothioate linkage
  modified_base 3: mod_base = OTHER; note = 2'-O-methyl modified nucleotide
  modified_base 4: mod_base = OTHER; note = 2'-O-methyl modified nucleotide
  modified_base 5: mod_base = OTHER; note = 2'-fluoro modified nucleotide
  modified_base 6: mod_base = OTHER; note = 2'-O-methyl modified nucleotide
  modified_base 7: mod_base = OTHER; note = 2'-fluoro modified nucleotide
  modified_base 8: mod_base = OTHER; note = 2'-fluoro modified nucleotide
  modified_base 9: mod_base = OTHER; note = 2'-fluoro modified nucleotide
  modified_base 10: mod_base = OTHER; note = 2'-O-methyl modified nucleotide
  modified_base 11: mod_base = OTHER; note = 2'-O-methyl modified nucleotide
  modified_base 12: mod_base = OTHER; note = 2'-O-methyl modified nucleotide
  modified_base 13: mod_base = OTHER; note = 2'-O-methyl modified nucleotide
  modified_base 14: mod_base = OTHER; note = 2'-O-methyl modified nucleotide
  modified_base 15: mod_base = OTHER; note = 2'-O-methyl modified nucleotide
  modified_base 16: mod_base = OTHER; note = 2'-O-methyl modified nucleotide
  modified_base 17: mod_base = OTHER; note = 2'-O-methyl modified nucleotide
  modified_base 18: mod_base = OTHER; note = 2'-O-methyl modified nucleotide
  modified_base 19: mod_base = OTHER; note = 2'-O-methyl modified nucleotide
catagggatcgtcctcaaa

SEQ ID NO: 835 - RNA, 19 nt, synthetic construct
  source 1..19: mol_type = other RNA
  modified_base 1: mod_base = OTHER; note = 2'-O-methyl modified nucleotide with phosphorothioate linkage
  modified_base 2: mod_base = OTHER; note = 2'-O-methyl modified nucleotide with phosphorothioate linkage
  modified_base 3: mod_base = OTHER; note = 2'-O-methyl modified nucleotide
  modified_base 4: mod_base = OTHER; note = 2'-O-methyl modified nucleotide
  modified_base 5: mod_base = OTHER; note = 2'-fluoro modified nucleotide
  modified_base 6: mod_base = OTHER; note = 2'-O-methyl modified nucleotide
  modified_base 7: mod_base = OTHER; note = 2'-fluoro modified nucleotide
  modified_base 8: mod_base = OTHER; note = 2'-fluoro modified nucleotide
  modified_base 9: mod_base = OTHER; note = 2'-fluoro modified nucleotide
  modified_base 10: mod_base = OTHER; note = 2'-O-methyl modified nucleotide
  modified_base 11: mod_base = OTHER; note = 2'-O-methyl modified nucleotide
  modified_base 12: mod_base = OTHER; note = 2'-O-methyl modified nucleotide
  modified_base 13: mod_base = OTHER; note = 2'-O-methyl modified nucleotide
  modified_base 14: mod_base = OTHER; note = 2'-O-methyl modified nucleotide
  modified_base 15: mod_base = OTHER; note = 2'-O-methyl modified nucleotide
  modified_base 16: mod_base = OTHER; note = 2'-O-methyl modified nucleotide
  modified_base 17: mod_base = OTHER; note = 2'-O-methyl modified nucleotide
  modified_base 18: mod_base = OTHER; note = 2'-O-methyl modified nucleotide
  modified_base 19: mod_base = OTHER; note = 2'-O-methyl modified nucleotide
atcaaggctcacttatgga

SEQ ID NO: 836 - RNA, 19 nt, synthetic construct
  source 1..19: mol_type = other RNA
  modified_base 1: mod_base = OTHER; note = 2'-O-methyl modified nucleotide with phosphorothioate linkage
  modified_base 2: mod_base = OTHER; note = 2'-O-methyl modified nucleotide with phosphorothioate linkage
  modified_base 3: mod_base = OTHER; note = 2'-O-methyl modified nucleotide
  modified_base 4: mod_base = OTHER; note = 2'-O-methyl modified nucleotide
  modified_base 5: mod_base = OTHER; note = 2'-fluoro modified nucleotide
  modified_base 6: mod_base = OTHER; note = 2'-O-methyl modified nucleotide
  modified_base 7: mod_base = OTHER; note = 2'-fluoro modified nucleotide
  modified_base 8: mod_base = OTHER; note = 2'-fluoro modified nucleotide
  modified_base 9: mod_base = OTHER; note = 2'-fluoro modified nucleotide
  modified_base 10: mod_base = OTHER; note = 2'-O-methyl modified nucleotide
  modified_base 11: mod_base = OTHER; note = 2'-O-methyl modified nucleotide
  modified_base 12: mod_base = OTHER; note = 2'-O-methyl modified nucleotide
  modified_base 13: mod_base = OTHER; note = 2'-O-methyl modified nucleotide
  modified_base 14: mod_base = OTHER; note = 2'-O-methyl modified nucleotide
  modified_base 15: mod_base = OTHER; note = 2'-O-methyl modified nucleotide
  modified_base 16: mod_base = OTHER; note = 2'-O-methyl modified nucleotide
  modified_base 17: mod_base = OTHER; note = 2'-O-methyl modified nucleotide
  modified_base 18: mod_base = OTHER; note = 2'-O-methyl modified nucleotide
  modified_base 19: mod_base = OTHER; note = 2'-O-methyl modified nucleotide
tgtccaatgtcttcagtca

SEQ ID NO: 837 - RNA, 19 nt, synthetic construct
  source 1..19: mol_type = other RNA
  modified_base 1: mod_base = OTHER; note = 2'-O-methyl modified nucleotide with phosphorothioate linkage
  modified_base 2: mod_base = OTHER; note = 2'-O-methyl modified nucleotide with phosphorothioate linkage
  modified_base 3: mod_base = OTHER; note = 2'-O-methyl modified nucleotide
  modified_base 4: mod_base = OTHER; note = 2'-O-methyl modified nucleotide
  modified_base 5: mod_base = OTHER; note = 2'-fluoro modified nucleotide
  modified_base 6: mod_base = OTHER; note = 2'-O-methyl modified nucleotide
  modified_base 7: mod_base = OTHER; note = 2'-fluoro modified nucleotide
  modified_base 8: mod_base = OTHER; note = 2'-fluoro modified nucleotide
  modified_base 9: mod_base = OTHER; note = 2'-fluoro modified nucleotide
  modified_base 10: mod_base = OTHER; note = 2'-O-methyl modified nucleotide
  modified_base 11: mod_base = OTHER; note = 2'-O-methyl modified nucleotide
  modified_base 12: mod_base = OTHER; note = 2'-O-methyl modified nucleotide
  modified_base 13: mod_base = OTHER; note = 2'-O-methyl modified nucleotide
  modified_base 14: mod_base = OTHER; note = 2'-O-methyl modified nucleotide
  modified_base 15: mod_base = OTHER; note = 2'-O-methyl modified nucleotide
  modified_base 16: mod_base = OTHER; note = 2'-O-methyl modified nucleotide
  modified_base 17: mod_base = OTHER; note = 2'-O-methyl modified nucleotide
  modified_base 18: mod_base = OTHER; note = 2'-O-methyl modified nucleotide
  modified_base 19: mod_base = OTHER; note = 2'-O-methyl modified nucleotide
ccacaatacatgcgctata

SEQ ID NO: 838 - RNA, 19 nt, synthetic construct
  source 1..19: mol_type = other RNA
  modified_base 1: mod_base = OTHER; note = 2'-O-methyl modified nucleotide with phosphorothioate linkage
  modified_base 2: mod_base = OTHER; note = 2'-O-methyl modified nucleotide with phosphorothioate linkage
  modified_base 3: mod_base = OTHER; note = 2'-O-methyl modified nucleotide
  modified_base 4: mod_base = OTHER; note = 2'-O-methyl modified nucleotide
  modified_base 5: mod_base = OTHER; note = 2'-fluoro modified nucleotide
  modified_base 6: mod_base = OTHER; note = 2'-O-methyl modified nucleotide
  modified_base 7: mod_base = OTHER; note = 2'-fluoro modified nucleotide
  modified_base 8: mod_base = OTHER; note = 2'-fluoro modified nucleotide
  modified_base 9: mod_base = OTHER; note = 2'-fluoro modified nucleotide
  modified_base 10: mod_base = OTHER; note = 2'-O-methyl modified nucleotide
  modified_base 11: mod_base = OTHER; note = 2'-O-methyl modified nucleotide
  modified_base 12: mod_base = OTHER; note = 2'-O-methyl modified nucleotide
  modified_base 13: mod_base = OTHER; note = 2'-O-methyl modified nucleotide
  modified_base 14: mod_base = OTHER; note = 2'-O-methyl modified nucleotide
  modified_base 15: mod_base = OTHER; note = 2'-O-methyl modified nucleotide
  modified_base 16: mod_base = OTHER; note = 2'-O-methyl modified nucleotide
  modified_base 17: mod_base = OTHER; note = 2'-O-methyl modified nucleotide
  modified_base 18: mod_base = OTHER; note = 2'-O-methyl modified nucleotide
  modified_base 19: mod_base = OTHER; note = 2'-O-methyl modified nucleotide
tagggatcgtcctcaaata

SEQ ID NO: 839 - RNA, 19 nt, synthetic construct
  source 1..19: mol_type = other RNA
  modified_base 1: mod_base = OTHER; note = 2'-O-methyl modified nucleotide with phosphorothioate linkage
  modified_base 2: mod_base = OTHER; note = 2'-O-methyl modified nucleotide with phosphorothioate linkage
  modified_base 3: mod_base = OTHER; note = 2'-O-methyl modified nucleotide
  modified_base 4: mod_base = OTHER; note = 2'-O-methyl modified nucleotide
  modified_base 5: mod_base = OTHER; note = 2'-fluoro modified nucleotide
  modified_base 6: mod_base = OTHER; note = 2'-O-methyl modified nucleotide
  modified_base 7: mod_base = OTHER; note = 2'-fluoro modified nucleotide
  modified_base 8: mod_base = OTHER; note = 2'-fluoro modified nucleotide
  modified_base 9: mod_base = OTHER; note = 2'-fluoro modified nucleotide
  modified_base 10: mod_base = OTHER; note = 2'-O-methyl modified nucleotide
  modified_base 11: mod_base = OTHER; note = 2'-O-methyl modified nucleotide
  modified_base 12: mod_base = OTHER; note = 2'-O-methyl modified nucleotide
  modified_base 13: mod_base = OTHER; note = 2'-O-methyl modified nucleotide
  modified_base 14: mod_base = OTHER; note = 2'-O-methyl modified nucleotide
  modified_base 15: mod_base = OTHER; note = 2'-O-methyl modified nucleotide
  modified_base 16: mod_base = OTHER; note = 2'-O-methyl modified nucleotide
  modified_base 17: mod_base = OTHER; note = 2'-O-methyl modified nucleotide
  modified_base 18: mod_base = OTHER; note = 2'-O-methyl modified nucleotide
  modified_base 19: mod_base = OTHER; note = 2'-O-methyl modified nucleotide
agactcccaaggataaaaa

SEQ ID NO: 840 - RNA, 19 nt, synthetic construct
  source 1..19: mol_type = other RNA
  modified_base 1: mod_base = OTHER; note = 2'-O-methyl modified nucleotide with phosphorothioate linkage
  modified_base 2: mod_base = OTHER; note = 2'-O-methyl modified nucleotide with phosphorothioate linkage
  modified_base 3: mod_base = OTHER; note = 2'-O-methyl modified nucleotide
  modified_base 4: mod_base = OTHER; note = 2'-O-methyl modified nucleotide
  modified_base 5: mod_base = OTHER; note = 2'-fluoro modified nucleotide
  modified_base 6: mod_base = OTHER; note = 2'-O-methyl modified nucleotide
  modified_base 7: mod_base = OTHER; note = 2'-fluoro modified nucleotide
  modified_base 8: mod_base = OTHER; note = 2'-fluoro modified nucleotide
  modified_base 9: mod_base = OTHER; note = 2'-fluoro modified nucleotide
  modified_base 10: mod_base = OTHER; note = 2'-O-methyl modified nucleotide
  modified_base 11: mod_base = OTHER; note = 2'-O-methyl modified nucleotide
  modified_base 12: mod_base = OTHER; note = 2'-O-methyl modified nucleotide
  modified_base 13: mod_base = OTHER; note = 2'-O-methyl modified nucleotide
  modified_base 14: mod_base = OTHER; note = 2'-O-methyl modified nucleotide
  modified_base 15: mod_base = OTHER; note = 2'-O-methyl modified nucleotide
  modified_base 16: mod_base = OTHER; note = 2'-O-methyl modified nucleotide
  modified_base 17: mod_base = OTHER; note = 2'-O-methyl modified nucleotide
  modified_base 18: mod_base = OTHER; note = 2'-O-methyl modified nucleotide
  modified_base 19: mod_base = OTHER; note = 2'-O-methyl modified nucleotide
cttcagtctggccatgaaa

SEQ ID NO: 841 - RNA, 19 nt, synthetic construct
  source 1..19: mol_type = other RNA
  modified_base 1: mod_base = OTHER; note = 2'-O-methyl modified nucleotide with phosphorothioate linkage
  modified_base 2: mod_base = OTHER; note = 2'-O-methyl modified nucleotide with phosphorothioate linkage
  modified_base 3: mod_base = OTHER; note = 2'-O-methyl modified nucleotide
  modified_base 4: mod_base = OTHER; note = 2'-O-methyl modified nucleotide
  modified_base 5: mod_base = OTHER; note = 2'-fluoro modified nucleotide
  modified_base 6: mod_base = OTHER; note = 2'-O-methyl modified nucleotide
  modified_base 7: mod_base = OTHER; note = 2'-fluoro modified nucleotide
  modified_base 8: mod_base = OTHER; note = 2'-fluoro modified nucleotide
  modified_base 9: mod_base = OTHER; note = 2'-fluoro modified nucleotide
  modified_base 10: mod_base = OTHER; note = 2'-O-methyl modified nucleotide
  modified_base 11: mod_base = OTHER; note = 2'-O-methyl modified nucleotide
  modified_base 12: mod_base = OTHER; note = 2'-O-methyl modified nucleotide
  modified_base 13: mod_base = OTHER; note = 2'-O-methyl modified nucleotide
  modified_base 14: mod_base = OTHER; note = 2'-O-methyl modified nucleotide
  modified_base 15: mod_base = OTHER; note = 2'-O-methyl modified nucleotide
  modified_base 16: mod_base = OTHER; note = 2'-O-methyl modified nucleotide
  modified_base 17: mod_base = OTHER; note = 2'-O-methyl modified nucleotide
  modified_base 18: mod_base = OTHER; note = 2'-O-methyl modified nucleotide
  modified_base 19: mod_base = OTHER; note = 2'-O-methyl modified nucleotide
aggatggaggcccacaaca

SEQ ID NO: 842 - RNA, 19 nt, synthetic construct
  source 1..19: mol_type = other RNA
  modified_base 1: mod_base = OTHER; note = 2'-O-methyl modified nucleotide with phosphorothioate linkage
  modified_base 2: mod_base = OTHER; note = 2'-O-methyl modified nucleotide with phosphorothioate linkage
  modified_base 3: mod_base = OTHER; note = 2'-O-methyl modified nucleotide
  modified_base 4: mod_base = OTHER; note = 2'-O-methyl modified nucleotide
  modified_base 5: mod_base = OTHER; note = 2'-fluoro modified nucleotide
  modified_base 6: mod_base = OTHER; note = 2'-O-methyl modified nucleotide
  modified_base 7: mod_base = OTHER; note = 2'-fluoro modified nucleotide
  modified_base 8: mod_base = OTHER; note = 2'-fluoro modified nucleotide
  modified_base 9: mod_base = OTHER; note = 2'-fluoro modified nucleotide
  modified_base 10: mod_base = OTHER; note = 2'-O-methyl modified nucleotide
  modified_base 11: mod_base = OTHER; note = 2'-O-methyl modified nucleotide
  modified_base 12: mod_base = OTHER; note = 2'-O-methyl modified nucleotide
  modified_base 13: mod_base = OTHER; note = 2'-O-methyl modified nucleotide
  modified_base 14: mod_base = OTHER; note = 2'-O-methyl modified nucleotide
  modified_base 15: mod_base = OTHER; note = 2'-O-methyl modified nucleotide
  modified_base 16: mod_base = OTHER; note = 2'-O-methyl modified nucleotide
  modified_base 17: mod_base = OTHER; note = 2'-O-methyl modified nucleotide
  modified_base 18: mod_base = OTHER; note = 2'-O-methyl modified nucleotide
  modified_base 19: mod_base = OTHER; note = 2'-O-methyl modified nucleotide
cactcaattcctgaactaa

SEQ ID NO: 843 - RNA, 19 nt, synthetic construct
  source 1..19: mol_type = other RNA
  modified_base 1: mod_base = OTHER; note = 2'-O-methyl modified nucleotide with phosphorothioate linkage
  modified_base 2: mod_base = OTHER; note = 2'-O-methyl modified nucleotide with phosphorothioate linkage
  modified_base 3: mod_base = OTHER; note = 2'-O-methyl modified nucleotide
  modified_base 4: mod_base = OTHER; note = 2'-O-methyl modified nucleotide
  modified_base 5: mod_base = OTHER; note = 2'-fluoro modified nucleotide
  modified_base 6: mod_base = OTHER; note = 2'-O-methyl modified nucleotide
  modified_base 7: mod_base = OTHER; note = 2'-fluoro modified nucleotide
  modified_base 8: mod_base = OTHER; note = 2'-fluoro modified nucleotide
  modified_base 9: mod_base = OTHER; note = 2'-fluoro modified nucleotide
  modified_base 10: mod_base = OTHER; note = 2'-O-methyl modified nucleotide
  modified_base 11: mod_base = OTHER; note = 2'-O-methyl modified nucleotide
  modified_base 12: mod_base = OTHER; note = 2'-O-methyl modified nucleotide
  modified_base 13: mod_base = OTHER; note = 2'-O-methyl modified nucleotide
  modified_base 14: mod_base = OTHER; note = 2'-O-methyl modified nucleotide
  modified_base 15: mod_base = OTHER; note = 2'-O-methyl modified nucleotide
  modified_base 16: mod_base = OTHER; note = 2'-O-methyl modified nucleotide
  modified_base 17: mod_base = OTHER; note = 2'-O-methyl modified nucleotide
  modified_base 18: mod_base = OTHER; note = 2'-O-methyl modified nucleotide
  modified_base 19: mod_base = OTHER; note = 2'-O-methyl modified nucleotide
gttctcattccttgcacca

SEQ ID NO: 844 - RNA, 19 nt, synthetic construct
  source 1..19: mol_type = other RNA
  modified_base 1: mod_base = OTHER; note = 2'-O-methyl modified nucleotide with phosphorothioate linkage
  modified_base 2: mod_base = OTHER; note = 2'-O-methyl modified nucleotide with phosphorothioate linkage
  modified_base 3: mod_base = OTHER; note = 2'-O-methyl modified nucleotide
  modified_base 4: mod_base = OTHER; note = 2'-O-methyl modified nucleotide
  modified_base 5: mod_base = OTHER; note = 2'-fluoro modified nucleotide
  modified_base 6: mod_base = OTHER; note = 2'-O-methyl modified nucleotide
  modified_base 7: mod_base = OTHER; note = 2'-fluoro modified nucleotide
  modified_base 8: mod_base = OTHER; note = 2'-fluoro modified nucleotide
  modified_base 9: mod_base = OTHER; note = 2'-fluoro modified nucleotide
  modified_base 10: mod_base = OTHER; note = 2'-O-methyl modified nucleotide
  modified_base 11: mod_base = OTHER; note = 2'-O-methyl modified nucleotide
  modified_base 12: mod_base = OTHER; note = 2'-O-methyl modified nucleotide
  modified_base 13: mod_base = OTHER; note = 2'-O-methyl modified nucleotide
  modified_base 14: mod_base = OTHER; note = 2'-O-methyl modified nucleotide
  modified_base 15: mod_base = OTHER; note = 2'-O-methyl modified nucleotide
  modified_base 16: mod_base = OTHER; note = 2'-O-methyl modified nucleotide
  modified_base 17: mod_base = OTHER; note = 2'-O-methyl modified nucleotide
  modified_base 18: mod_base = OTHER; note = 2'-O-methyl modified nucleotide
  modified_base 19: mod_base = OTHER; note = 2'-O-methyl modified nucleotide
aaggtgccctataaaggca

SEQ ID NO: 845 - RNA, 19 nt, synthetic construct
  source 1..19: mol_type = other RNA
  modified_base 1: mod_base = OTHER; note = 2'-O-methyl modified nucleotide with phosphorothioate linkage
  modified_base 2: mod_base = OTHER; note = 2'-O-methyl modified nucleotide with phosphorothioate linkage
  modified_base 3: mod_base = OTHER; note = 2'-O-methyl modified nucleotide
  modified_base 4: mod_base = OTHER; note = 2'-O-methyl modified nucleotide
  modified_base 5: mod_base = OTHER; note = 2'-fluoro modified nucleotide
  modified_base 6: mod_base = OTHER; note = 2'-O-methyl modified nucleotide
  modified_base 7: mod_base = OTHER; note = 2'-fluoro modified nucleotide
  modified_base 8: mod_base = OTHER; note = 2'-fluoro modified nucleotide
  modified_base 9: mod_base = OTHER; note = 2'-fluoro modified nucleotide
  modified_base 10: mod_base = OTHER; note = 2'-O-methyl modified nucleotide
  modified_base 11: mod_base = OTHER; note = 2'-O-methyl modified nucleotide
  modified_base 12: mod_base = OTHER; note = 2'-O-methyl modified nucleotide
  modified_base 13: mod_base = OTHER; note = 2'-O-methyl modified nucleotide
  modified_base 14: mod_base = OTHER; note = 2'-O-methyl modified nucleotide
  modified_base 15: mod_base = OTHER; note = 2'-O-methyl modified nucleotide
  modified_base 16: mod_base = OTHER; note = 2'-O-methyl modified nucleotide
  modified_base 17: mod_base = OTHER; note = 2'-O-methyl modified nucleotide
  modified_base 18: mod_base = OTHER; note = 2'-O-methyl modified nucleotide
  modified_base 19: mod_base = OTHER; note = 2'-O-methyl modified nucleotide
aacaaaaatgatctacaca

SEQ ID NO: 846 - RNA, 19 nt, synthetic construct
  source 1..19: mol_type = other RNA
  modified_base 1: mod_base = OTHER; note = 2'-O-methyl modified nucleotide with phosphorothioate linkage
  modified_base 2: mod_base = OTHER; note = 2'-O-methyl modified nucleotide with phosphorothioate linkage
  modified_base 3: mod_base = OTHER; note = 2'-O-methyl modified nucleotide
  modified_base 4: mod_base = OTHER; note = 2'-O-methyl modified nucleotide
  modified_base 5: mod_base = OTHER; note = 2'-fluoro modified nucleotide
  modified_base 6: mod_base = OTHER; note = 2'-O-methyl modified nucleotide
  modified_base 7: mod_base = OTHER; note = 2'-fluoro modified nucleotide
  modified_base 8: mod_base = OTHER; note = 2'-fluoro modified nucleotide
  modified_base 9: mod_base = OTHER; note = 2'-fluoro modified nucleotide
  modified_base 10: mod_base = OTHER; note = 2'-O-methyl modified nucleotide
  modified_base 11: mod_base = OTHER; note = 2'-O-methyl modified nucleotide
  modified_base 12: mod_base = OTHER; note = 2'-O-methyl modified nucleotide
  modified_base 13: mod_base = OTHER; note = 2'-O-methyl modified nucleotide
  modified_base 14: mod_base = OTHER; note = 2'-O-methyl modified nucleotide
  modified_base 15: mod_base = OTHER; note = 2'-O-methyl modified nucleotide
  modified_base 16: mod_base = OTHER; note = 2'-O-methyl modified nucleotide
  modified_base 17: mod_base = OTHER; note = 2'-O-methyl modified nucleotide
  modified_base 18: mod_base = OTHER; note = 2'-O-methyl modified nucleotide
  modified_base 19: mod_base = OTHER; note = 2'-O-methyl modified nucleotide
cctgccacccaactttgga

SEQ ID NO: 847 - RNA, 19 nt, synthetic construct
  source 1..19: mol_type = other RNA
  modified_base 1: mod_base = OTHER; note = 2'-O-methyl modified nucleotide with phosphorothioate linkage
  modified_base 2: mod_base = OTHER; note = 2'-O-methyl modified nucleotide with phosphorothioate linkage
  modified_base 3: mod_base = OTHER; note = 2'-O-methyl modified nucleotide
  modified_base 4: mod_base = OTHER; note = 2'-O-methyl modified nucleotide
  modified_base 5: mod_base = OTHER; note = 2'-fluoro modified nucleotide
  modified_base 6: mod_base = OTHER; note = 2'-O-methyl modified nucleotide
  modified_base 7: mod_base = OTHER; note = 2'-fluoro modified nucleotide
  modified_base 8: mod_base = OTHER; note = 2'-fluoro modified nucleotide
  modified_base 9: mod_base = OTHER; note = 2'-fluoro modified nucleotide
  modified_base 10: mod_base = OTHER; note = 2'-O-methyl modified nucleotide
  modified_base 11: mod_base = OTHER; note = 2'-O-methyl modified nucleotide
  modified_base 12: mod_base = OTHER; note = 2'-O-methyl modified nucleotide
  modified_base 13: mod_base = OTHER; note = 2'-O-methyl modified nucleotide
  modified_base 14: mod_base = OTHER; note = 2'-O-methyl modified nucleotide
  modified_base 15: mod_base = OTHER; note = 2'-O-methyl modified nucleotide
  modified_base 16: mod_base = OTHER; note = 2'-O-methyl modified nucleotide
  modified_base 17: mod_base = OTHER; note = 2'-O-methyl modified nucleotide
  modified_base 18: mod_base = OTHER; note = 2'-O-methyl modified nucleotide
  modified_base 19: mod_base = OTHER; note = 2'-O-methyl modified nucleotide
tgcagtgtggccgtcacaa

SEQ ID NO: 848 - RNA, 19 nt, synthetic construct
  source 1..19: mol_type = other RNA
  modified_base 1: mod_base = OTHER; note = 2'-O-methyl modified nucleotide with phosphorothioate linkage
  modified_base 2: mod_base = OTHER; note = 2'-O-methyl modified nucleotide with phosphorothioate linkage
  modified_base 3: mod_base = OTHER; note = 2'-O-methyl modified nucleotide
  modified_base 4: mod_base = OTHER; note = 2'-O-methyl modified nucleotide
  modified_base 5: mod_base = OTHER; note = 2'-fluoro modified nucleotide
  modified_base 6: mod_base = OTHER; note = 2'-O-methyl modified nucleotide
  modified_base 7: mod_base = OTHER; note = 2'-fluoro modified nucleotide
  modified_base 8: mod_base = OTHER; note = 2'-fluoro modified nucleotide
  modified_base 9: mod_base = OTHER; note = 2'-fluoro modified nucleotide
  modified_base 10: mod_base = OTHER; note = 2'-O-methyl modified nucleotide
  modified_base 11: mod_base = OTHER; note = 2'-O-methyl modified nucleotide
  modified_base 12: mod_base = OTHER; note = 2'-O-methyl modified nucleotide
  modified_base 13: mod_base = OTHER; note = 2'-O-methyl modified nucleotide
  modified_base 14: mod_base = OTHER; note = 2'-O-methyl modified nucleotide
  modified_base 15: mod_base = OTHER; note = 2'-O-methyl modified nucleotide
  modified_base 16: mod_base = OTHER; note = 2'-O-methyl modified nucleotide
  modified_base 17: mod_base = OTHER; note = 2'-O-methyl modified nucleotide
  modified_base 18: mod_base = OTHER; note = 2'-O-methyl modified nucleotide
  modified_base 19: mod_base = OTHER; note = 2'-O-methyl modified nucleotide
atcaagggagggatgatca

SEQ ID NO: 849 - RNA, 19 nt, synthetic construct
  source 1..19: mol_type = other RNA
  modified_base 1: mod_base = OTHER; note = 2'-O-methyl modified nucleotide with phosphorothioate linkage
  modified_base 2: mod_base = OTHER; note = 2'-O-methyl modified nucleotide with phosphorothioate linkage
  modified_base 3: mod_base = OTHER; note = 2'-O-methyl modified nucleotide
  modified_base 4: mod_base = OTHER; note = 2'-O-methyl modified nucleotide
  modified_base 5: mod_base = OTHER; note = 2'-fluoro modified nucleotide
  modified_base 6: mod_base = OTHER; note = 2'-O-methyl modified nucleotide
  modified_base 7: mod_base = OTHER; note = 2'-fluoro modified nucleotide
  modified_base 8: mod_base = OTHER; note = 2'-fluoro modified nucleotide
  modified_base 9: mod_base = OTHER; note = 2'-fluoro modified nucleotide
  modified_base 10: mod_base = OTHER; note = 2'-O-methyl modified nucleotide
  modified_base 11: mod_base = OTHER; note = 2'-O-methyl modified nucleotide
  modified_base 12: mod_base = OTHER; note = 2'-O-methyl modified nucleotide
  modified_base 13: mod_base = OTHER; note = 2'-O-methyl modified nucleotide
  modified_base 14: mod_base = OTHER; note = 2'-O-methyl modified nucleotide
  modified_base 15: mod_base = OTHER; note = 2'-O-methyl modified nucleotide
  modified_base 16: mod_base = OTHER; note = 2'-O-methyl modified nucleotide
  modified_base 17: mod_base = OTHER; note = 2'-O-methyl modified nucleotide
  modified_base 18: mod_base = OTHER; note = 2'-O-methyl modified nucleotide
  modified_base 19: mod_base = OTHER; note = 2'-O-methyl modified nucleotide
atccaaacggccacaataa

SEQ ID NO: 850 - RNA, 19 nt, synthetic construct
  source 1..19: mol_type = other RNA
  modified_base 1: mod_base = OTHER; note = 2'-O-methyl modified nucleotide with phosphorothioate linkage
  modified_base 2: mod_base = OTHER; note = 2'-O-methyl modified nucleotide with phosphorothioate linkage
  modified_base 3: mod_base = OTHER; note = 2'-O-methyl modified nucleotide
  modified_base 4: mod_base = OTHER; note = 2'-O-methyl modified nucleotide
  modified_base 5: mod_base = OTHER; note = 2'-fluoro modified nucleotide
  modified_base 6: mod_base = OTHER; note = 2'-O-methyl modified nucleotide
  modified_base 7: mod_base = OTHER; note = 2'-fluoro modified nucleotide
  modified_base 8: mod_base = OTHER; note = 2'-fluoro modified nucleotide
  modified_base 9: mod_base = OTHER; note = 2'-fluoro modified nucleotide
  modified_base 10: mod_base = OTHER; note = 2'-O-methyl modified nucleotide
  modified_base 11: mod_base = OTHER; note = 2'-O-methyl modified nucleotide
  modified_base 12: mod_base = OTHER; note = 2'-O-methyl modified nucleotide
  modified_base 13: mod_base = OTHER; note = 2'-O-methyl modified nucleotide
  modified_base 14: mod_base = OTHER; note = 2'-O-methyl modified nucleotide
  modified_base 15: mod_base = OTHER; note = 2'-O-methyl modified nucleotide
  modified_base 16: mod_base = OTHER; note = 2'-O-methyl modified nucleotide
  modified_base 17: mod_base = OTHER; note = 2'-O-methyl modified nucleotide
  modified_base 18: mod_base = OTHER; note = 2'-O-methyl modified nucleotide
  modified_base 19: mod_base = OTHER; note = 2'-O-methyl modified nucleotide
cagtgtggccgtcacagta

SEQ ID NO: 851 - RNA, 19 nt, synthetic construct
  source 1..19: mol_type = other RNA
  modified_base 1: mod_base = OTHER; note = 2'-O-methyl modified nucleotide with phosphorothioate linkage
  modified_base 2: mod_base = OTHER; note = 2'-O-methyl modified nucleotide with phosphorothioate linkage
  modified_base 3: mod_base = OTHER; note = 2'-O-methyl modified nucleotide
  modified_base 4: mod_base = OTHER; note = 2'-O-methyl modified nucleotide
  modified_base 5: mod_base = OTHER; note = 2'-fluoro modified nucleotide
  modified_base 6: mod_base = OTHER; note = 2'-O-methyl modified nucleotide
  modified_base 7: mod_base = OTHER; note = 2'-fluoro modified nucleotide
  modified_base 8: mod_base = OTHER; note = 2'-fluoro modified nucleotide
  modified_base 9: mod_base = OTHER; note = 2'-fluoro modified nucleotide
  modified_base 10: mod_base = OTHER; note = 2'-O-methyl modified nucleotide
  modified_base 11: mod_base = OTHER; note = 2'-O-methyl modified nucleotide
  modified_base 12: mod_base = OTHER; note = 2'-O-methyl modified nucleotide
  modified_base 13: mod_base = OTHER; note = 2'-O-methyl modified nucleotide
  modified_base 14: mod_base = OTHER; note = 2'-O-methyl modified nucleotide
  modified_base 15: mod_base = OTHER; note = 2'-O-methyl modified nucleotide
  modified_base 16: mod_base = OTHER; note = 2'-O-methyl modified nucleotide
  modified_base 17: mod_base = OTHER; note = 2'-O-methyl modified nucleotide
  modified_base 18: mod_base = OTHER; note = 2'-O-methyl modified nucleotide
  modified_base 19: mod_base = OTHER; note = 2'-O-methyl modified nucleotide
caagcgccccacagaccta

SEQ ID NO: 852 - RNA, 19 nt, synthetic construct
  source 1..19: mol_type = other RNA
  modified_base 1: mod_base = OTHER; note = 2'-O-methyl modified nucleotide with phosphorothioate linkage
  modified_base 2: mod_base = OTHER; note = 2'-O-methyl modified nucleotide with phosphorothioate linkage
  modified_base 3: mod_base = OTHER; note = 2'-O-methyl modified nucleotide
  modified_base 4: mod_base = OTHER; note = 2'-O-methyl modified nucleotide
  modified_base 5: mod_base = OTHER; note = 2'-fluoro modified nucleotide
  modified_base 6: mod_base = OTHER; note = 2'-O-methyl modified nucleotide
  modified_base 7: mod_base = OTHER; note = 2'-fluoro modified nucleotide
  modified_base 8: mod_base = OTHER; note = 2'-fluoro modified nucleotide
  modified_base 9: mod_base = OTHER; note = 2'-fluoro modified nucleotide
  modified_base 10: mod_base = OTHER; note = 2'-O-methyl modified nucleotide
  modified_base 11: mod_base = OTHER; note = 2'-O-methyl modified nucleotide
  modified_base 12: mod_base = OTHER; note = 2'-O-methyl modified nucleotide
  modified_base 13: mod_base = OTHER; note = 2'-O-methyl modified nucleotide
  modified_base 14: mod_base = OTHER; note = 2'-O-methyl modified nucleotide
  modified_base 15: mod_base = OTHER; note = 2'-O-methyl modified nucleotide
  modified_base 16: mod_base = OTHER; note = 2'-O-methyl modified nucleotide
  modified_base 17: mod_base = OTHER; note = 2'-O-methyl modified nucleotide
  modified_base 18: mod_base = OTHER; note = 2'-O-methyl modified nucleotide
  modified_base 19: mod_base = OTHER; note = 2'-O-methyl modified nucleotide
ctcacttatggaagcctaa

SEQ ID NO: 853 - RNA, 19 nt, synthetic construct
  source 1..19: mol_type = other RNA
  modified_base 1: mod_base = OTHER; note = 2'-O-methyl modified nucleotide with phosphorothioate linkage
  modified_base 2: mod_base = OTHER; note = 2'-O-methyl modified nucleotide with phosphorothioate linkage
  modified_base 3: mod_base = OTHER; note = 2'-O-methyl modified nucleotide
  modified_base 4: mod_base = OTHER; note = 2'-O-methyl modified nucleotide
  modified_base 5: mod_base = OTHER; note = 2'-fluoro modified nucleotide
  modified_base 6: mod_base = OTHER; note = 2'-O-methyl modified nucleotide
  modified_base 7: mod_base = OTHER; note = 2'-fluoro modified nucleotide
  modified_base 8: mod_base = OTHER; note = 2'-fluoro modified nucleotide
  modified_base 9: mod_base = OTHER; note = 2'-fluoro modified nucleotide
  modified_base 10: mod_base = OTHER; note = 2'-O-methyl modified nucleotide
  modified_base 11: mod_base = OTHER; note = 2'-O-methyl modified nucleotide
  modified_base 12: mod_base = OTHER; note = 2'-O-methyl modified nucleotide
  modified_base 13: mod_base = OTHER; note = 2'-O-methyl modified nucleotide
  modified_base 14: mod_base = OTHER; note = 2'-O-methyl modified nucleotide
  modified_base 15: mod_base = OTHER; note = 2'-O-methyl modified nucleotide
  modified_base 16: mod_base = OTHER; note = 2'-O-methyl modified nucleotide
  modified_base 17: mod_base = OTHER; note = 2'-O-methyl modified nucleotide
  modified_base 18: mod_base = OTHER; note = 2'-O-methyl modified nucleotide
  modified_base 19: mod_base = OTHER; note = 2'-O-methyl modified nucleotide
aaggacaaggtgccctata

SEQ ID NO: 854 - RNA, 19 nt, synthetic construct
  source 1..19: mol_type = other RNA
  modified_base 1: mod_base = OTHER; note = 2'-O-methyl modified nucleotide with phosphorothioate linkage
  modified_base 2: mod_base = OTHER; note = 2'-O-methyl modified nucleotide with phosphorothioate linkage
  modified_base 3: mod_base = OTHER; note = 2'-O-methyl modified nucleotide
  modified_base 4: mod_base = OTHER; note = 2'-O-methyl modified nucleotide
  modified_base 5: mod_base = OTHER; note = 2'-fluoro modified nucleotide
  modified_base 6: mod_base = OTHER; note = 2'-O-methyl modified nucleotide
  modified_base 7: mod_base = OTHER; note = 2'-fluoro modified nucleotide
  modified_base 8: mod_base = OTHER; note = 2'-fluoro modified nucleotide
  modified_base 9: mod_base = OTHER; note = 2'-fluoro modified nucleotide
  modified_base 10: mod_base = OTHER; note = 2'-O-methyl modified nucleotide
  modified_base 11: mod_base = OTHER; note = 2'-O-methyl modified nucleotide
  modified_base 12: mod_base = OTHER; note = 2'-O-methyl modified nucleotide
  modified_base 13: mod_base = OTHER; note = 2'-O-methyl modified nucleotide
  modified_base 14: mod_base = OTHER; note = 2'-O-methyl modified nucleotide
  modified_base 15: mod_base = OTHER; note = 2'-O-methyl modified nucleotide
  modified_base 16: mod_base = OTHER; note = 2'-O-methyl modified nucleotide
  modified_base 17: mod_base = OTHER; note = 2'-O-methyl modified nucleotide
  modified_base 18: mod_base = OTHER; note = 2'-O-methyl modified nucleotide
  modified_base 19: mod_base = OTHER; note = 2'-O-methyl modified nucleotide
agcatttccagtacatcta

SEQ ID NO: 855 - RNA, 19 nt, synthetic construct
  source 1..19: mol_type = other RNA
  modified_base 1: mod_base = OTHER; note = 2'-O-methyl modified nucleotide with phosphorothioate linkage
  modified_base 2: mod_base = OTHER; note = 2'-O-methyl modified nucleotide with phosphorothioate linkage
  modified_base 3: mod_base = OTHER; note = 2'-O-methyl modified nucleotide
  modified_base 4: mod_base = OTHER; note = 2'-O-methyl modified nucleotide
  modified_base 5: mod_base = OTHER; note = 2'-fluoro modified nucleotide
  modified_base 6: mod_base = OTHER; note = 2'-O-methyl modified nucleotide
  modified_base 7: mod_base = OTHER; note = 2'-fluoro modified nucleotide
  modified_base 8: mod_base = OTHER; note = 2'-fluoro modified nucleotide
  modified_base 9: mod_base = OTHER; note = 2'-fluoro modified nucleotide
  modified_base 10: mod_base = OTHER; note = 2'-O-methyl modified nucleotide
  modified_base 11: mod_base = OTHER; note = 2'-O-methyl modified nucleotide
  modified_base 12: mod_base = OTHER; note = 2'-O-methyl modified nucleotide
  modified_base 13: mod_base = OTHER; note = 2'-O-methyl modified nucleotide
  modified_base 14: mod_base = OTHER; note = 2'-O-methyl modified nucleotide
  modified_base 15: mod_base = OTHER; note = 2'-O-methyl modified nucleotide
  modified_base 16: mod_base = OTHER; note = 2'-O-methyl modified nucleotide
  modified_base 17: mod_base = OTHER; note = 2'-O-methyl modified nucleotide
  modified_base 18: mod_base = OTHER; note = 2'-O-methyl modified nucleotide
  modified_base 19: mod_base = OTHER; note = 2'-O-methyl modified nucleotide
aatatatatgtttaaccca

SEQ ID NO: 856 - RNA, 19 nt, synthetic construct
  source 1..19: mol_type = other RNA
  modified_base 1: mod_base = OTHER; note = 2'-O-methyl modified nucleotide with phosphorothioate linkage
  modified_base 2: mod_base = OTHER; note = 2'-O-methyl modified nucleotide with phosphorothioate linkage
  modified_base 3: mod_base = OTHER; note = 2'-O-methyl modified nucleotide
  modified_base 4: mod_base = OTHER; note = 2'-O-methyl modified nucleotide
  modified_base 5: mod_base = OTHER; note = 2'-fluoro modified nucleotide
  modified_base 6: mod_base = OTHER; note = 2'-O-methyl modified nucleotide
  modified_base 7: mod_base = OTHER; note = 2'-fluoro modified nucleotide
  modified_base 8: mod_base = OTHER; note = 2'-fluoro modified nucleotide
  modified_base 9: mod_base = OTHER; note = 2'-fluoro modified nucleotide
  modified_base 10: mod_base = OTHER; note = 2'-O-methyl modified nucleotide
  modified_base 11: mod_base = OTHER; note = 2'-O-methyl modified nucleotide
  modified_base 12: mod_base = OTHER; note = 2'-O-methyl modified nucleotide
  modified_base 13: mod_base = OTHER; note = 2'-O-methyl modified nucleotide
  modified_base 14: mod_base = OTHER; note = 2'-O-methyl modified nucleotide
  modified_base 15: mod_base = OTHER; note = 2'-O-methyl modified nucleotide
  modified_base 16: mod_base = OTHER; note = 2'-O-methyl modified nucleotide
  modified_base 17: mod_base = OTHER; note = 2'-O-methyl modified nucleotide
  modified_base 18: mod_base = OTHER; note = 2'-O-methyl modified nucleotide
  modified_base 19: mod_base = OTHER; note = 2'-O-methyl modified nucleotide
gccacccaactttggcaaa

SEQ ID NO: 857 - RNA, 19 nt, synthetic construct
  source 1..19: mol_type = other RNA
  modified_base 1: mod_base = OTHER; note = 2'-O-methyl modified nucleotide with phosphorothioate linkage
  modified_base 2: mod_base = OTHER; note = 2'-O-methyl modified nucleotide with phosphorothioate linkage
  modified_base 3: mod_base = OTHER; note = 2'-O-methyl modified nucleotide
  modified_base 4: mod_base = OTHER; note = 2'-O-methyl modified nucleotide
  modified_base 5: mod_base = OTHER; note = 2'-fluoro modified nucleotide
  modified_base 6: mod_base = OTHER; note = 2'-O-methyl modified nucleotide
  modified_base 7: mod_base = OTHER; note = 2'-fluoro modified nucleotide
  modified_base 8: mod_base = OTHER; note = 2'-fluoro modified nucleotide
  modified_base 9: mod_base = OTHER; note = 2'-fluoro modified nucleotide
  modified_base 10: mod_base = OTHER; note = 2'-O-methyl modified nucleotide
  modified_base 11: mod_base = OTHER; note = 2'-O-methyl modified nucleotide
  modified_base 12: mod_base = OTHER; note = 2'-O-methyl modified nucleotide
  modified_base 13: mod_base = OTHER; note = 2'-O-methyl modified nucleotide
  modified_base 14: mod_base = OTHER; note = 2'-O-methyl modified nucleotide
  modified_base 15: mod_base = OTHER; note = 2'-O-methyl modified nucleotide
  modified_base 16: mod_base = OTHER; note = 2'-O-methyl modified nucleotide
  modified_base 17: mod_base = OTHER; note = 2'-O-methyl modified nucleotide
  modified_base 18: mod_base = OTHER; note = 2'-O-methyl modified nucleotide
  modified_base 19: mod_base = OTHER; note = 2'-O-methyl modified nucleotide
catgattttccagcttgga

SEQ ID NO: 858 - RNA, 19 nt, synthetic construct
  source 1..19: mol_type = other RNA
  modified_base 1: mod_base = OTHER; note = 2'-O-methyl modified nucleotide with phosphorothioate linkage
  modified_base 2: mod_base = OTHER; note = 2'-O-methyl modified nucleotide with phosphorothioate linkage
  modified_base 3: mod_base = OTHER; note = 2'-O-methyl modified nucleotide
  modified_base 4: mod_base = OTHER; note = 2'-O-methyl modified nucleotide
  modified_base 5: mod_base = OTHER; note = 2'-fluoro modified nucleotide
  modified_base 6: mod_base = OTHER; note = 2'-O-methyl modified nucleotide
  modified_base 7: mod_base = OTHER; note = 2'-fluoro modified nucleotide
  modified_base 8: mod_base = OTHER; note = 2'-fluoro modified nucleotide
  modified_base 9: mod_base = OTHER; note = 2'-fluoro modified nucleotide
  modified_base 10: mod_base = OTHER; note = 2'-O-methyl modified nucleotide
  modified_base 11: mod_base = OTHER; note = 2'-O-methyl modified nucleotide
  modified_base 12: mod_base = OTHER; note = 2'-O-methyl modified nucleotide
  modified_base 13: mod_base = OTHER; note = 2'-O-methyl modified nucleotide
  modified_base 14: mod_base = OTHER; note = 2'-O-methyl modified nucleotide
  modified_base 15: mod_base = OTHER; note = 2'-O-methyl modified nucleotide
  modified_base 16: mod_base = OTHER; note = 2'-O-methyl modified nucleotide
  modified_base 17: mod_base = OTHER; note = 2'-O-methyl modified nucleotide
  modified_base 18: mod_base = OTHER; note = 2'-O-methyl modified nucleotide
  modified_base 19: mod_base = OTHER; note = 2'-O-methyl modified nucleotide
gtatggcatcatgccccta

SEQ ID NO: 859 - RNA, 19 nt, synthetic construct
  source 1..19: mol_type = other RNA
  modified_base 1: mod_base = OTHER; note = 2'-O-methyl modified nucleotide with phosphorothioate linkage
  modified_base 2: mod_base = OTHER; note = 2'-O-methyl modified nucleotide with phosphorothioate linkage
  modified_base 3: mod_base = OTHER; note = 2'-O-methyl modified nucleotide
  modified_base 4: mod_base = OTHER; note = 2'-O-methyl modified nucleotide
  modified_base 5: mod_base = OTHER; note = 2'-fluoro modified nucleotide
  modified_base 6: mod_base = OTHER; note = 2'-O-methyl modified nucleotide
  modified_base 7: mod_base = OTHER; note = 2'-fluoro modified nucleotide
  modified_base 8: mod_base = OTHER; note = 2'-fluoro modified nucleotide
  modified_base 9: mod_base = OTHER; note = 2'-fluoro modified nucleotide
  modified_base 10: mod_base = OTHER; note = 2'-O-methyl modified nucleotide
  modified_base 11: mod_base = OTHER; note = 2'-O-methyl modified nucleotide
  modified_base 12: mod_base = OTHER; note = 2'-O-methyl modified nucleotide
  modified_base 13: mod_base = OTHER; note = 2'-O-methyl modified nucleotide
  modified_base 14: mod_base = OTHER; note = 2'-O-methyl modified nucleotide
  modified_base 15: mod_base = OTHER; note = 2'-O-methyl modified nucleotide
  modified_base 16: mod_base = OTHER; note = 2'-O-methyl modified nucleotide
  modified_base 17: mod_base = OTHER; note = 2'-O-methyl modified nucleotide
  modified_base 18: mod_base = OTHER; note = 2'-O-methyl modified nucleotide
  modified_base 19: mod_base = OTHER; note = 2'-O-methyl modified nucleotide
acctgaagtcattggacca

SEQ ID NO: 860 - RNA, 19 nt, synthetic construct
  source 1..19: mol_type = other RNA
  modified_base 1: mod_base = OTHER; note = 2'-O-methyl modified nucleotide with phosphorothioate linkage
  modified_base 2: mod_base = OTHER; note = 2'-O-methyl modified nucleotide with phosphorothioate linkage
  modified_base 3: mod_base = OTHER; note = 2'-O-methyl modified nucleotide
  modified_base 4: mod_base = OTHER; note = 2'-O-methyl modified nucleotide
  modified_base 5: mod_base = OTHER; note = 2'-fluoro modified nucleotide
  modified_base 6: mod_base = OTHER; note = 2'-O-methyl modified nucleotide
  modified_base 7: mod_base = OTHER; note = 2'-fluoro modified nucleotide
  modified_base 8: mod_base = OTHER; note = 2'-fluoro modified nucleotide
  modified_base 9: mod_base = OTHER; note = 2'-fluoro modified nucleotide
  modified_base 10: mod_base = OTHER; note = 2'-O-methyl modified nucleotide
  modified_base 11: mod_base = OTHER; note = 2'-O-methyl modified nucleotide
  modified_base 12: mod_base = OTHER; note = 2'-O-methyl modified nucleotide
  modified_base 13: mod_base = OTHER; note = 2'-O-methyl modified nucleotide
  modified_base 14: mod_base = OTHER; note = 2'-O-methyl modified nucleotide
  modified_base 15: mod_base = OTHER; note = 2'-O-methyl modified nucleotide
  modified_base 16: mod_base = OTHER; note = 2'-O-methyl modified nucleotide
  modified_base 17: mod_base = OTHER; note = 2'-O-methyl modified nucleotide
  modified_base 18: mod_base = OTHER; note = 2'-O-methyl modified nucleotide
  modified_base 19: mod_base = OTHER; note = 2'-O-methyl modified nucleotide
gacaaggtgccctataaaa

SEQ ID NO: 861 - RNA, 19 nt, synthetic construct
  source 1..19: mol_type = other RNA
  modified_base 1: mod_base = OTHER; note = 2'-O-methyl modified nucleotide with phosphorothioate linkage
  modified_base 2: mod_base = OTHER; note = 2'-O-methyl modified nucleotide with phosphorothioate linkage
  modified_base 3: mod_base = OTHER; note = 2'-O-methyl modified nucleotide
  modified_base 4: mod_base = OTHER; note = 2'-O-methyl modified nucleotide
  modified_base 5: mod_base = OTHER; note = 2'-fluoro modified nucleotide
  modified_base 6: mod_base = OTHER; note = 2'-O-methyl modified nucleotide
  modified_base 7: mod_base = OTHER; note = 2'-fluoro modified nucleotide
  modified_base 8: mod_base = OTHER; note = 2'-fluoro modified nucleotide
  modified_base 9: mod_base = OTHER; note = 2'-fluoro modified nucleotide
  modified_base 10: mod_base = OTHER; note = 2'-O-methyl modified nucleotide
  modified_base 11: mod_base = OTHER; note = 2'-O-methyl modified nucleotide
  modified_base 12: mod_base = OTHER; note = 2'-O-methyl modified nucleotide
  modified_base 13: mod_base = OTHER; note = 2'-O-methyl modified nucleotide
  modified_base 14: mod_base = OTHER; note = 2'-O-methyl modified nucleotide
  modified_base 15: mod_base = OTHER; note = 2'-O-methyl modified nucleotide
  modified_base 16: mod_base = OTHER; note = 2'-O-methyl modified nucleotide
  modified_base 17: mod_base = OTHER; note = 2'-O-methyl modified nucleotide
  modified_base 18: mod_base = OTHER; note = 2'-O-methyl modified nucleotide
  modified_base 19: mod_base = OTHER; note = 2'-O-methyl modified nucleotide
tcacttatggaagcctaaa

SEQ ID NO: 862 - RNA, 19 nt, synthetic construct
  source 1..19: mol_type = other RNA
  modified_base 1: mod_base = OTHER; note = 2'-O-methyl modified nucleotide with phosphorothioate linkage
  modified_base 2: mod_base = OTHER; note = 2'-O-methyl modified nucleotide with phosphorothioate linkage
  modified_base 3: mod_base = OTHER; note = 2'-O-methyl modified nucleotide
  modified_base 4: mod_base = OTHER; note = 2'-O-methyl modified nucleotide
  modified_base 5: mod_base = OTHER; note = 2'-fluoro modified nucleotide
  modified_base 6: mod_base = OTHER; note = 2'-O-methyl modified nucleotide
  modified_base 7: mod_base = OTHER; note = 2'-fluoro modified nucleotide
  modified_base 8: mod_base = OTHER; note = 2'-fluoro modified nucleotide
  modified_base 9: mod_base = OTHER; note = 2'-fluoro modified nucleotide
  modified_base 10: mod_base = OTHER; note = 2'-O-methyl modified nucleotide
  modified_base 11: mod_base = OTHER; note = 2'-O-methyl modified nucleotide
  modified_base 12: mod_base = OTHER; note = 2'-O-methyl modified nucleotide
  modified_base 13: mod_base = OTHER; note = 2'-O-methyl modified nucleotide
  modified_base 14: mod_base = OTHER; note = 2'-O-methyl modified nucleotide
  modified_base 15: mod_base = OTHER; note = 2'-O-methyl modified nucleotide
  modified_base 16: mod_base = OTHER; note = 2'-O-methyl modified nucleotide
  modified_base 17: mod_base = OTHER; note = 2'-O-methyl modified nucleotide
  modified_base 18: mod_base = OTHER; note = 2'-O-methyl modified nucleotide
  modified_base 19: mod_base = OTHER; note = 2'-O-methyl modified nucleotide
atcgtcctcaaatccaaaa

SEQ ID NO: 863 - RNA, 19 nt, synthetic construct
  source 1..19: mol_type = other RNA
  modified_base 1: mod_base = OTHER; note = 2'-O-methyl modified nucleotide with phosphorothioate linkage
  modified_base 2: mod_base = OTHER; note = 2'-O-methyl modified nucleotide with phosphorothioate linkage
  modified_base 3: mod_base = OTHER; note = 2'-O-methyl modified nucleotide
  modified_base 4: mod_base = OTHER; note = 2'-O-methyl modified nucleotide
  modified_base 5: mod_base = OTHER; note = 2'-fluoro modified nucleotide
  modified_base 6: mod_base = OTHER; note = 2'-O-methyl modified nucleotide
  modified_base 7: mod_base = OTHER; note = 2'-fluoro modified nucleotide
  modified_base 8: mod_base = OTHER; note = 2'-fluoro modified nucleotide
  modified_base 9: mod_base = OTHER; note = 2'-fluoro modified nucleotide
  modified_base 10: mod_base = OTHER; note = 2'-O-methyl modified nucleotide
  modified_base 11: mod_base = OTHER; note = 2'-O-methyl modified nucleotide
  modified_base 12: mod_base = OTHER; note = 2'-O-methyl modified nucleotide
  modified_base 13: mod_base = OTHER; note = 2'-O-methyl modified nucleotide
  modified_base 14: mod_base = OTHER; note = 2'-O-methyl modified nucleotide
  modified_base 15: mod_base = OTHER; note = 2'-O-methyl modified nucleotide
  modified_base 16: mod_base = OTHER; note = 2'-O-methyl modified nucleotide
  modified_base 17: mod_base = OTHER; note = 2'-O-methyl modified nucleotide
  modified_base 18: mod_base = OTHER; note = 2'-O-methyl modified nucleotide
  modified_base 19: mod_base = OTHER; note = 2'-O-methyl modified nucleotide
ctcagcattgtgatgacca

SEQ ID NO: 864 - RNA, 19 nt, synthetic construct
  source 1..19: mol_type = other RNA
  modified_base 1: mod_base = OTHER; note = 2'-O-methyl modified nucleotide with phosphorothioate linkage
  modified_base 2: mod_base = OTHER; note = 2'-O-methyl modified nucleotide with phosphorothioate linkage
  modified_base 3: mod_base = OTHER; note = 2'-O-methyl modified nucleotide
  modified_base 4: mod_base = OTHER; note = 2'-O-methyl modified nucleotide
  modified_base 5: mod_base = OTHER; note = 2'-fluoro modified nucleotide
  modified_base 6: mod_base = OTHER; note = 2'-O-methyl modified nucleotide
  modified_base 7: mod_base = OTHER; note = 2'-fluoro modified nucleotide
  modified_base 8: mod_base = OTHER; note = 2'-fluoro modified nucleotide
  modified_base 9: mod_base = OTHER; note = 2'-fluoro modified nucleotide
  modified_base 10: mod_base = OTHER; note = 2'-O-methyl modified nucleotide
  modified_base 11: mod_base = OTHER; note = 2'-O-methyl modified nucleotide
  modified_base 12: mod_base = OTHER; note = 2'-O-methyl modified nucleotide
  modified_base 13: mod_base = OTHER; note = 2'-O-methyl modified nucleotide
  modified_base 14: mod_base = OTHER; note = 2'-O-methyl modified nucleotide
  modified_base 15: mod_base = OTHER; note = 2'-O-methyl modified nucleotide
  modified_base 16: mod_base = OTHER; note = 2'-O-methyl modified nucleotide
  modified_base 17: mod_base = OTHER; note = 2'-O-methyl modified nucleotide
  modified_base 18: mod_base = OTHER; note = 2'-O-methyl modified nucleotide
  modified_base 19: mod_base = OTHER; note = 2'-O-methyl modified nucleotide
tggccgggaacacagacaa

SEQ ID NO: 865 - RNA, 19 nt, synthetic construct
  source 1..19: mol_type = other RNA
  modified_base 1: mod_base = OTHER; note = 2'-O-methyl modified nucleotide with phosphorothioate linkage
  modified_base 2: mod_base = OTHER; note = 2'-O-methyl modified nucleotide with phosphorothioate linkage
  modified_base 3: mod_base = OTHER; note = 2'-O-methyl modified nucleotide
  modified_base 4: mod_base = OTHER; note = 2'-O-methyl modified nucleotide
  modified_base 5: mod_base = OTHER; note = 2'-fluoro modified nucleotide
  modified_base 6: mod_base = OTHER; note = 2'-O-methyl modified nucleotide
  modified_base 7: mod_base = OTHER; note = 2'-fluoro modified nucleotide
  modified_base 8: mod_base = OTHER; note = 2'-fluoro modified nucleotide
  modified_base 9: mod_base = OTHER; note = 2'-fluoro modified nucleotide
  modified_base 10: mod_base = OTHER; note = 2'-O-methyl modified nucleotide
  modified_base 11: mod_base = OTHER; note = 2'-O-methyl modified nucleotide
  modified_base 12: mod_base = OTHER; note = 2'-O-methyl modified nucleotide
  modified_base 13: mod_base = OTHER; note = 2'-O-methyl modified nucleotide
  modified_base 14: mod_base = OTHER; note = 2'-O-methyl modified nucleotide
  modified_base 15: mod_base = OTHER; note = 2'-O-methyl modified nucleotide
  modified_base 16: mod_base = OTHER; note = 2'-O-methyl modified nucleotide
  modified_base 17: mod_base = OTHER; note = 2'-O-methyl modified nucleotide
  modified_base 18: mod_base = OTHER; note = 2'-O-methyl modified nucleotide
  modified_base 19: mod_base = OTHER; note = 2'-O-methyl modified nucleotide
ttgcacagcctagccctta

SEQ ID NO: 866 - RNA, 19 nt, synthetic construct
  source 1..19: mol_type = other RNA
  modified_base 1: mod_base = OTHER; note = 2'-O-methyl modified nucleotide with phosphorothioate linkage
  modified_base 2: mod_base = OTHER; note = 2'-O-methyl modified nucleotide with phosphorothioate linkage
  modified_base 3: mod_base = OTHER; note = 2'-O-methyl modified nucleotide
  modified_base 4: mod_base = OTHER; note = 2'-O-methyl modified nucleotide
  modified_base 5: mod_base = OTHER; note = 2'-fluoro modified nucleotide
  modified_base 6: mod_base = OTHER; note = 2'-O-methyl modified nucleotide
  modified_base 7: mod_base = OTHER; note = 2'-fluoro modified nucleotide
  modified_base 8: mod_base = OTHER; note = 2'-fluoro modified nucleotide
  modified_base 9: mod_base = OTHER; note = 2'-fluoro modified nucleotide
  modified_base 10: mod_base = OTHER; note = 2'-O-methyl modified nucleotide
  modified_base 11: mod_base = OTHER; note = 2'-O-methyl modified nucleotide
  modified_base 12: mod_base = OTHER; note = 2'-O-methyl modified nucleotide
  modified_base 13: mod_base = OTHER; note = 2'-O-methyl modified nucleotide
  modified_base 14: mod_base = OTHER; note = 2'-O-methyl modified nucleotide
  modified_base 15: mod_base = OTHER; note = 2'-O-methyl modified nucleotide
  modified_base 16: mod_base = OTHER; note = 2'-O-methyl modified nucleotide
  modified_base 17: mod_base = OTHER; note = 2'-O-methyl modified nucleotide
  modified_base 18: mod_base = OTHER; note = 2'-O-methyl modified nucleotide
  modified_base 19: mod_base = OTHER; note = 2'-O-methyl modified nucleotide
accctgccacccaacttta

SEQ ID NO: 867 - RNA, 19 nt, synthetic construct
  source 1..19: mol_type = other RNA
  modified_base 1: mod_base = OTHER; note = 2'-O-methyl modified nucleotide with phosphorothioate linkage
  modified_base 2: mod_base = OTHER; note = 2'-O-methyl modified nucleotide with phosphorothioate linkage
  modified_base 3: mod_base = OTHER; note = 2'-O-methyl modified nucleotide
  modified_base 4: mod_base = OTHER; note = 2'-O-methyl modified nucleotide
  modified_base 5: mod_base = OTHER; note = 2'-fluoro modified nucleotide
  modified_base 6: mod_base = OTHER; note = 2'-O-methyl modified nucleotide
  modified_base 7: mod_base = OTHER; note = 2'-fluoro modified nucleotide
  modified_base 8: mod_base = OTHER; note = 2'-fluoro modified nucleotide
  modified_base 9: mod_base = OTHER; note = 2'-fluoro modified nucleotide
  modified_base 10: mod_base = OTHER; note = 2'-O-methyl modified nucleotide
  modified_base 11: mod_base = OTHER; note = 2'-O-methyl modified nucleotide
  modified_base 12: mod_base = OTHER; note = 2'-O-methyl modified nucleotide
  modified_base 13: mod_base = OTHER; note = 2'-O-methyl modified nucleotide
  modified_base 14: mod_base = OTHER; note = 2'-O-methyl modified nucleotide
  modified_base 15: mod_base = OTHER; note = 2'-O-methyl modified nucleotide
  modified_base 16: mod_base = OTHER; note = 2'-O-methyl modified nucleotide
  modified_base 17: mod_base = OTHER; note = 2'-O-methyl modified nucleotide
  modified_base 18: mod_base = OTHER; note = 2'-O-methyl modified nucleotide
  modified_base 19: mod_base = OTHER; note = 2'-O-methyl modified nucleotide
cttgcaccatagggatcga

SEQ ID NO: 868 - RNA, 19 nt, synthetic construct
  source 1..19: mol_type = other RNA
  modified_base 1: mod_base = OTHER; note = 2'-O-methyl modified nucleotide with phosphorothioate linkage
  modified_base 2: mod_base = OTHER; note = 2'-O-methyl modified nucleotide with phosphorothioate linkage
  modified_base 3: mod_base = OTHER; note = 2'-O-methyl modified nucleotide
  modified_base 4: mod_base = OTHER; note = 2'-O-methyl modified nucleotide
  modified_base 5: mod_base = OTHER; note = 2'-fluoro modified nucleotide
  modified_base 6: mod_base = OTHER; note = 2'-O-methyl modified nucleotide
  modified_base 7: mod_base = OTHER; note = 2'-fluoro modified nucleotide
  modified_base 8: mod_base = OTHER; note = 2'-fluoro modified nucleotide
  modified_base 9: mod_base = OTHER; note = 2'-fluoro modified nucleotide
  modified_base 10: mod_base = OTHER; note = 2'-O-methyl modified nucleotide
  modified_base 11: mod_base = OTHER; note = 2'-O-methyl modified nucleotide
  modified_base 12: mod_base = OTHER; note = 2'-O-methyl modified nucleotide
  modified_base 13: mod_base = OTHER; note = 2'-O-methyl modified nucleotide
  modified_base 14: mod_base = OTHER; note = 2'-O-methyl modified nucleotide
  modified_base 15: mod_base = OTHER; note = 2'-O-methyl modified nucleotide
  modified_base 16: mod_base = OTHER; note = 2'-O-methyl modified nucleotide
  modified_base 17: mod_base = OTHER; note = 2'-O-methyl modified nucleotide
  modified_base 18: mod_base = OTHER; note = 2'-O-methyl modified nucleotide
  modified_base 19: mod_base = OTHER; note = 2'-O-methyl modified nucleotide
ggagggatgatcatcatta

SEQ ID NO: 869 - RNA, 19 nt, synthetic construct
  source 1..19: mol_type = other RNA
  modified_base 1: mod_base = OTHER; note = 2'-O-methyl modified nucleotide with phosphorothioate linkage
  modified_base 2: mod_base = OTHER; note = 2'-O-methyl modified nucleotide with phosphorothioate linkage
  modified_base 3: mod_base = OTHER; note = 2'-O-methyl modified nucleotide
  modified_base 4: mod_base = OTHER; note = 2'-O-methyl modified nucleotide
  modified_base 5: mod_base = OTHER; note = 2'-fluoro modified nucleotide
  modified_base 6: mod_base = OTHER; note = 2'-O-methyl modified nucleotide
  modified_base 7: mod_base = OTHER; note = 2'-fluoro modified nucleotide
  modified_base 8: mod_base = OTHER; note = 2'-fluoro modified nucleotide
  modified_base 9: mod_base = OTHER; note = 2'-fluoro modified nucleotide
  modified_base 10: mod_base = OTHER; note = 2'-O-methyl modified nucleotide
  modified_base 11: mod_base = OTHER; note = 2'-O-methyl modified nucleotide
  modified_base 12: mod_base = OTHER; note = 2'-O-methyl modified nucleotide
  modified_base 13: mod_base = OTHER; note = 2'-O-methyl modified nucleotide
  modified_base 14: mod_base = OTHER; note = 2'-O-methyl modified nucleotide
  modified_base 15: mod_base = OTHER; note = 2'-O-methyl modified nucleotide
  modified_base 16: mod_base = OTHER; note = 2'-O-methyl modified nucleotide
  modified_base 17: mod_base = OTHER; note = 2'-O-methyl modified nucleotide
  modified_base 18: mod_base = OTHER; note = 2'-O-methyl modified nucleotide
  modified_base 19: mod_base = OTHER; note = 2'-O-methyl modified nucleotide
aattcctgaactaatcaaa

SEQ ID NO: 870 - RNA, 19 nt, synthetic construct
  source 1..19: mol_type = other RNA
  modified_base 1: mod_base = OTHER; note = 2'-O-methyl modified nucleotide with phosphorothioate linkage
  modified_base 2: mod_base = OTHER; note = 2'-O-methyl modified nucleotide with phosphorothioate linkage
  modified_base 3: mod_base = OTHER; note = 2'-O-methyl modified nucleotide
  modified_base 4: mod_base = OTHER; note = 2'-O-methyl modified nucleotide
  modified_base 5: mod_base = OTHER; note = 2'-fluoro modified nucleotide
  modified_base 6: mod_base = OTHER; note = 2'-O-methyl modified nucleotide
  modified_base 7: mod_base = OTHER; note = 2'-fluoro modified nucleotide
  modified_base 8: mod_base = OTHER; note = 2'-fluoro modified nucleotide
  modified_base 9: mod_base = OTHER; note = 2'-fluoro modified nucleotide
  modified_base 10: mod_base = OTHER; note = 2'-O-methyl modified nucleotide
  modified_base 11: mod_base = OTHER; note = 2'-O-methyl modified nucleotide
  modified_base 12: mod_base = OTHER; note = 2'-O-methyl modified nucleotide
  modified_base 13: mod_base = OTHER; note = 2'-O-methyl modified nucleotide
  modified_base 14: mod_base = OTHER; note = 2'-O-methyl modified nucleotide
  modified_base 15: mod_base = OTHER; note = 2'-O-methyl modified nucleotide
  modified_base 16: mod_base = OTHER; note = 2'-O-methyl modified nucleotide
  modified_base 17: mod_base = OTHER; note = 2'-O-methyl modified nucleotide
  modified_base 18: mod_base = OTHER; note = 2'-O-methyl modified nucleotide
  modified_base 19: mod_base = OTHER; note = 2'-O-methyl modified nucleotide
agaactgcacaagaaacga

SEQ ID NO: 871 - RNA, 19 nt, synthetic construct
  source 1..19: mol_type = other RNA
  modified_base 1: mod_base = OTHER; note = 2'-O-methyl modified nucleotide with phosphorothioate linkage
  modified_base 2: mod_base = OTHER; note = 2'-O-methyl modified nucleotide with phosphorothioate linkage
  modified_base 3: mod_base = OTHER; note = 2'-O-methyl modified nucleotide
  modified_base 4: mod_base = OTHER; note = 2'-O-methyl modified nucleotide
  modified_base 5: mod_base = OTHER; note = 2'-fluoro modified nucleotide
  modified_base 6: mod_base = OTHER; note = 2'-O-methyl modified nucleotide
  modified_base 7: mod_base = OTHER; note = 2'-fluoro modified nucleotide
  modified_base 8: mod_base = OTHER; note = 2'-fluoro modified nucleotide
  modified_base 9: mod_base = OTHER; note = 2'-fluoro modified nucleotide
  modified_base 10: mod_base = OTHER; note = 2'-O-methyl modified nucleotide
  modified_base 11: mod_base = OTHER; note = 2'-O-methyl modified nucleotide
  modified_base 12: mod_base = OTHER; note = 2'-O-methyl modified nucleotide
  modified_base 13: mod_base = OTHER; note = 2'-O-methyl modified nucleotide
  modified_base 14: mod_base = OTHER; note = 2'-O-methyl modified nucleotide
  modified_base 15: mod_base = OTHER; note = 2'-O-methyl modified nucleotide
  modified_base 16: mod_base = OTHER; note = 2'-O-methyl modified nucleotide
  modified_base 17: mod_base = OTHER; note = 2'-O-methyl modified nucleotide
  modified_base 18: mod_base = OTHER; note = 2'-O-methyl modified nucleotide
  modified_base 19: mod_base = OTHER; note = 2'-O-methyl modified nucleotide
cacccaactttggcaagca

SEQ ID NO: 872 - RNA, 19 nt, synthetic construct
  source 1..19: mol_type = other RNA
  modified_base 1: mod_base = OTHER; note = 2'-O-methyl modified nucleotide with phosphorothioate linkage
  modified_base 2: mod_base = OTHER; note = 2'-O-methyl modified nucleotide with phosphorothioate linkage
  modified_base 3: mod_base = OTHER; note = 2'-O-methyl modified nucleotide
  modified_base 4: mod_base = OTHER; note = 2'-O-methyl modified nucleotide
  modified_base 5: mod_base = OTHER; note = 2'-fluoro modified nucleotide
  modified_base 6: mod_base = OTHER; note = 2'-O-methyl modified nucleotide
  modified_base 7: mod_base = OTHER; note = 2'-fluoro modified nucleotide
  modified_base 8: mod_base = OTHER; note = 2'-fluoro modified nucleotide
  modified_base 9: mod_base = OTHER; note = 2'-fluoro modified nucleotide
  modified_base 10: mod_base = OTHER; note = 2'-O-methyl modified nucleotide
  modified_base 11: mod_base = OTHER; note = 2'-O-methyl modified nucleotide
  modified_base 12: mod_base = OTHER; note = 2'-O-methyl modified nucleotide
  modified_base 13: mod_base = OTHER; note = 2'-O-methyl modified nucleotide
  modified_base 14: mod_base = OTHER; note = 2'-O-methyl modified nucleotide
  modified_base 15: mod_base = OTHER; note = 2'-O-methyl modified nucleotide
  modified_base 16: mod_base = OTHER; note = 2'-O-methyl modified nucleotide
  modified_base 17: mod_base = OTHER; note = 2'-O-methyl modified nucleotide
  modified_base 18: mod_base = OTHER; note = 2'-O-methyl modified nucleotide
  modified_base 19: mod_base = OTHER; note = 2'-O-methyl modified nucleotide
tcattccttgcaccataga

SEQ ID NO: 873 - RNA, 19 nt, synthetic construct
  source 1..19: mol_type = other RNA
  modified_base 1: mod_base = OTHER; note = 2'-O-methyl modified nucleotide with phosphorothioate linkage
  modified_base 2: mod_base = OTHER; note = 2'-O-methyl modified nucleotide with phosphorothioate linkage
  modified_base 3: mod_base = OTHER; note = 2'-O-methyl modified nucleotide
  modified_base 4: mod_base = OTHER; note = 2'-O-methyl modified nucleotide
  modified_base 5: mod_base = OTHER; note = 2'-fluoro modified nucleotide
  modified_base 6: mod_base = OTHER; note = 2'-O-methyl modified nucleotide
  modified_base 7: mod_base = OTHER; note = 2'-fluoro modified nucleotide
  modified_base 8: mod_base = OTHER; note = 2'-fluoro modified nucleotide
  modified_base 9: mod_base = OTHER; note = 2'-fluoro modified nucleotide
  modified_base 10: mod_base = OTHER; note = 2'-O-methyl modified nucleotide
  modified_base 11: mod_base = OTHER; note = 2'-O-methyl modified nucleotide
  modified_base 12: mod_base = OTHER; note = 2'-O-methyl modified nucleotide
  modified_base 13: mod_base = OTHER; note = 2'-O-methyl modified nucleotide
  modified_base 14: mod_base = OTHER; note = 2'-O-methyl modified nucleotide
  modified_base 15: mod_base = OTHER; note = 2'-O-methyl modified nucleotide
  modified_base 16: mod_base = OTHER; note = 2'-O-methyl modified nucleotide
  modified_base 17: mod_base = OTHER; note = 2'-O-methyl modified nucleotide
  modified_base 18: mod_base = OTHER; note = 2'-O-methyl modified nucleotide
  modified_base 19: mod_base = OTHER; note = 2'-O-methyl modified nucleotide
tcaaatccaaacggccaca

SEQ ID NO: 874 - RNA, 21 nt, synthetic construct
  source 1..21: mol_type = other RNA
  modified_base 1: mod_base = OTHER; note = 2'-O-methyl modified nucleotide with phosphorothioate linkage
  modified_base 2: mod_base = OTHER; note = 2'-fluoro modified nucleotide with phosphorothioate linkage
  modified_base 3: mod_base = OTHER; note = 2'-O-methyl modified nucleotide
  modified_base 4: mod_base = OTHER; note = 2'-O-methyl modified nucleotide
  modified_base 5: mod_base = OTHER; note = 2'-O-methyl modified nucleotide
  modified_base 6: mod_base = OTHER; note = 2'-fluoro modified nucleotide
  modified_base 7: mod_base = OTHER; note = 2'-O-methyl modified nucleotide
  modified_base 8: mod_base = OTHER; note = 2'-O-methyl modified nucleotide
  modified_base 9: mod_base = OTHER; note = 2'-O-methyl modified nucleotide
  modified_base 10: mod_base = OTHER; note = 2'-O-methyl modified nucleotide
  modified_base 11: mod_base = OTHER; note = 2'-O-methyl modified nucleotide
  modified_base 12: mod_base = OTHER; note = 2'-O-methyl modified nucleotide
  modified_base 13: mod_base = OTHER; note = 2'-O-methyl modified nucleotide
  modified_base 14: mod_base = OTHER; note = 2'-fluoro modified nucleotide
  modified_base 15: mod_base = OTHER; note = 2'-O-methyl modified nucleotide
  modified_base 16: mod_base = OTHER; note = 2'-fluoro modified nucleotide
  modified_base 17: mod_base = OTHER; note = 2'-O-methyl modified nucleotide
  modified_base 18: mod_base = OTHER; note = 2'-O-methyl modified nucleotide
  modified_base 19: mod_base = OTHER; note = 2'-O-methyl modified nucleotide with phosphorothioate linkage
  modified_base 20: mod_base = OTHER; note = 2'-O-methyl modified nucleotide with phosphorothioate linkage
  modified_base 21: mod_base = OTHER; note = 2'-O-methyl modified nucleotide
tccgtttggatttgaggacga

SEQ ID NO: 875 - RNA, 21 nt, synthetic construct
  source 1..21: mol_type = other RNA
  modified_base 1: mod_base = OTHER; note = 2'-O-methyl modified nucleotide with phosphorothioate linkage
  modified_base 2: mod_base = OTHER; note = 2'-fluoro modified nucleotide with phosphorothioate linkage
  modified_base 3: mod_base = OTHER; note = 2'-O-methyl modified nucleotide
  modified_base 4: mod_base = OTHER; note = 2'-O-methyl modified nucleotide
  modified_base 5: mod_base = OTHER; note = 2'-O-methyl modified nucleotide
  modified_base 6: mod_base = OTHER; note = 2'-fluoro modified nucleotide
  modified_base 7: mod_base = OTHER; note = 2'-O-methyl modified nucleotide
  modified_base 8: mod_base = OTHER; note = 2'-O-methyl modified nucleotide
  modified_base 9: mod_base = OTHER; note = 2'-O-methyl modified nucleotide
  modified_base 10: mod_base = OTHER; note = 2'-O-methyl modified nucleotide
  modified_base 11: mod_base = OTHER; note = 2'-O-methyl modified nucleotide
  modified_base 12: mod_base = OTHER; note = 2'-O-methyl modified nucleotide
  modified_base 13: mod_base = OTHER; note = 2'-O-methyl modified nucleotide
  modified_base 14: mod_base = OTHER; note = 2'-fluoro modified nucleotide
  modified_base 15: mod_base = OTHER; note = 2'-O-methyl modified nucleotide
  modified_base 16: mod_base = OTHER; note = 2'-fluoro modified nucleotide
  modified_base 17: mod_base = OTHER; note = 2'-O-methyl modified nucleotide
  modified_base 18: mod_base = OTHER; note = 2'-O-methyl modified nucleotide
  modified_base 19: mod_base = OTHER; note = 2'-O-methyl modified nucleotide with phosphorothioate linkage
  modified_base 20: mod_base = OTHER; note = 2'-O-methyl modified nucleotide with phosphorothioate linkage
  modified_base 21: mod_base = OTHER; note = 2'-O-methyl modified nucleotide
tggacgatccctatggtgcaa

SEQ ID NO: 876 - RNA, 21 nt, synthetic construct
  source 1..21: mol_type = other RNA
  modified_base 1: mod_base = OTHER; note = 2'-O-methyl modified nucleotide with phosphorothioate linkage
  modified_base 2: mod_base = OTHER; note = 2'-fluoro modified nucleotide with phosphorothioate linkage
  modified_base 3: mod_base = OTHER; note = 2'-O-methyl modified nucleotide
  modified_base 4: mod_base = OTHER; note = 2'-O-methyl modified nucleotide
  modified_base 5: mod_base = OTHER; note = 2'-O-methyl modified nucleotide
  modified_base 6: mod_base = OTHER; note = 2'-fluoro modified nucleotide
  modified_base 7: mod_base = OTHER; note = 2'-O-methyl modified nucleotide
  modified_base 8: mod_base = OTHER; note = 2'-O-methyl modified nucleotide
  modified_base 9: mod_base = OTHER; note = 2'-O-methyl modified nucleotide
  modified_base 10: mod_base = OTHER; note = 2'-O-methyl modified nucleotide
  modified_base 11: mod_base = OTHER; note = 2'-O-methyl modified nucleotide
  modified_base 12: mod_base = OTHER; note = 2'-O-methyl modified nucleotide
  modified_base 13: mod_base = OTHER; note = 2'-O-methyl modified nucleotide
  modified_base 14: mod_base = OTHER; note = 2'-fluoro modified nucleotide
  modified_base 15: mod_base = OTHER; note = 2'-O-methyl modified nucleotide
  modified_base 16: mod_base = OTHER; note = 2'-fluoro modified nucleotide
  modified_base 17: mod_base = OTHER; note = 2'-O-methyl modified nucleotide
  modified_base 18: mod_base = OTHER; note = 2'-O-methyl modified nucleotide
  modified_base 19: mod_base = OTHER; note = 2'-O-methyl modified nucleotide with phosphorothioate linkage
  modified_base 20: mod_base = OTHER; note = 2'-O-methyl modified nucleotide with phosphorothioate linkage
  modified_base 21: mod_base = OTHER; note = 2'-O-methyl modified nucleotide
tccctatggtgcaaggaatga

SEQ ID NO: 877 - RNA, 21 nt, synthetic construct
  source 1..21: mol_type = other RNA
  modified_base 1: mod_base = OTHER; note = 2'-O-methyl modified nucleotide with phosphorothioate linkage
  modified_base 2: mod_base = OTHER; note = 2'-fluoro modified nucleotide with phosphorothioate linkage
  modified_base 3: mod_base = OTHER; note = 2'-O-methyl modified nucleotide
  modified_base 4: mod_base = OTHER; note = 2'-O-methyl modified nucleotide
  modified_base 5: mod_base = OTHER; note = 2'-O-methyl modified nucleotide
  modified_base 6: mod_base = OTHER; note = 2'-fluoro modified nucleotide
  modified_base 7: mod_base = OTHER; note = 2'-O-methyl modified nucleotide
  modified_base 8: mod_base = OTHER; note = 2'-O-methyl modified nucleotide
  modified_base 9: mod_base = OTHER; note = 2'-O-methyl modified nucleotide
  modified_base 10: mod_base = OTHER; note = 2'-O-methyl modified nucleotide
  modified_base 11: mod_base = OTHER; note = 2'-O-methyl modified nucleotide
  modified_base 12: mod_base = OTHER; note = 2'-O-methyl modified nucleotide
  modified_base 13: mod_base = OTHER; note = 2'-O-methyl modified nucleotide
  modified_base 14: mod_base = OTHER; note = 2'-fluoro modified nucleotide
  modified_base 15: mod_base = OTHER; note = 2'-O-methyl modified nucleotide
  modified_base 16: mod_base = OTHER; note = 2'-fluoro modified nucleotide
  modified_base 17: mod_base = OTHER; note = 2'-O-methyl modified nucleotide
  modified_base 18: mod_base = OTHER; note = 2'-O-methyl modified nucleotide
  modified_base 19: mod_base = OTHER; note = 2'-O-methyl modified nucleotide with phosphorothioate linkage
  modified_base 20: mod_base = OTHER; note = 2'-O-methyl modified nucleotide with phosphorothioate linkage
  modified_base 21: mod_base = OTHER; note = 2'-O-methyl modified nucleotide
tatgccatactgtgccaccag

SEQ ID NO: 878 - RNA, 21 nt, synthetic construct
  source 1..21: mol_type = other RNA
  modified_base 1: mod_base = OTHER; note = 2'-O-methyl modified nucleotide with phosphorothioate linkage
  modified_base 2: mod_base = OTHER; note = 2'-fluoro modified nucleotide with phosphorothioate linkage
  modified_base 3: mod_base = OTHER; note = 2'-O-methyl modified nucleotide
  modified_base 4: mod_base = OTHER; note = 2'-O-methyl modified nucleotide
  modified_base 5: mod_base = OTHER; note = 2'-O-methyl modified nucleotide
  modified_base 6: mod_base = OTHER; note = 2'-fluoro modified nucleotide
  modified_base 7: mod_base = OTHER; note = 2'-O-methyl modified nucleotide
  modified_base 8: mod_base = OTHER; note = 2'-O-methyl modified nucleotide
  modified_base 9: mod_base = OTHER; note = 2'-O-methyl modified nucleotide
  modified_base 10: mod_base = OTHER; note = 2'-O-methyl modified nucleotide
  modified_base 11: mod_base = OTHER; note = 2'-O-methyl modified nucleotide
  modified_base 12: mod_base = OTHER; note = 2'-O-methyl modified nucleotide
  modified_base 13: mod_base = OTHER; note = 2'-O-methyl modified nucleotide
  modified_base 14: mod_base = OTHER; note = 2'-fluoro modified nucleotide
  modified_base 15: mod_base = OTHER; note = 2'-O-methyl modified nucleotide
  modified_base 16: mod_base = OTHER; note = 2'-fluoro modified nucleotide
  modified_base 17: mod_base = OTHER; note = 2'-O-methyl modified nucleotide
  modified_base 18: mod_base = OTHER; note = 2'-O-methyl modified nucleotide
  modified_base 19: mod_base = OTHER; note = 2'-O-methyl modified nucleotide with phosphorothioate linkage
  modified_base 20: mod_base = OTHER; note = 2'-O-methyl modified nucleotide with phosphorothioate linkage
  modified_base 21: mod_base = OTHER; note = 2'-O-methyl modified nucleotide
tactccgtttcttgtgcagtt

SEQ ID NO: 879 - RNA, 21 nt, synthetic construct
  source 1..21: mol_type = other RNA
  modified_base 1: mod_base = OTHER; note = 2'-O-methyl modified nucleotide with phosphorothioate linkage
  modified_base 2: mod_base = OTHER; note = 2'-fluoro modified nucleotide with phosphorothioate linkage
  modified_base 3: mod_base = OTHER; note = 2'-O-methyl modified nucleotide
  modified_base 4: mod_base = OTHER; note = 2'-O-methyl modified nucleotide
  modified_base 5: mod_base = OTHER; note = 2'-O-methyl modified nucleotide
  modified_base 6: mod_base = OTHER; note = 2'-fluoro modified nucleotide
  modified_base 7: mod_base = OTHER; note = 2'-O-methyl modified nucleotide
  modified_base 8: mod_base = OTHER; note = 2'-O-methyl modified nucleotide
  modified_base 9: mod_base = OTHER; note = 2'-O-methyl modified nucleotide
  modified_base 10: mod_base = OTHER; note = 2'-O-methyl modified nucleotide
  modified_base 11: mod_base = OTHER; note = 2'-O-methyl modified nucleotide
  modified_base 12: mod_base = OTHER; note = 2'-O-methyl modified nucleotide
  modified_base 13: mod_base = OTHER; note = 2'-O-methyl modified nucleotide
  modified_base 14: mod_base = OTHER; note = 2'-fluoro modified nucleotide
  modified_base 15: mod_base = OTHER; note = 2'-O-methyl modified nucleotide
  modified_base 16: mod_base = OTHER; note = 2'-fluoro modified nucleotide
  modified_base 17: mod_base = OTHER; note = 2'-O-methyl modified nucleotide
  modified_base 18: mod_base = OTHER; note = 2'-O-methyl modified nucleotide
  modified_base 19: mod_base = OTHER; note = 2'-O-methyl modified nucleotide with phosphorothioate linkage
  modified_base 20: mod_base = OTHER; note = 2'-O-methyl modified nucleotide with phosphorothioate linkage
  modified_base 21: mod_base = OTHER; note = 2'-O-methyl modified nucleotide
tgggtcacaaaacttggaatg

SEQ ID NO: 880 - RNA, 21 nt, synthetic construct
  source 1..21: mol_type = other RNA
  modified_base 1: mod_base = OTHER; note = 2'-O-methyl modified nucleotide with phosphorothioate linkage
  modified_base 2: mod_base = OTHER; note = 2'-fluoro modified nucleotide with phosphorothioate linkage
  modified_base 3: mod_base = OTHER; note = 2'-O-methyl modified nucleotide
  modified_base 4: mod_base = OTHER; note = 2'-O-methyl modified nucleotide
  modified_base 5: mod_base = OTHER; note = 2'-O-methyl modified nucleotide
  modified_base 6: mod_base = OTHER; note = 2'-fluoro modified nucleotide
  modified_base 7: mod_base = OTHER; note = 2'-O-methyl modified nucleotide
  modified_base 8: mod_base = OTHER; note = 2'-O-methyl modified nucleotide
  modified_base 9: mod_base = OTHER; note = 2'-O-methyl modified nucleotide
  modified_base 10: mod_base = OTHER; note = 2'-O-methyl modified nucleotide
  modified_base 11: mod_base = OTHER; note = 2'-O-methyl modified nucleotide
  modified_base 12: mod_base = OTHER; note = 2'-O-methyl modified nucleotide
  modified_base 13: mod_base = OTHER; note = 2'-O-methyl modified nucleotide
  modified_base 14: mod_base = OTHER; note = 2'-fluoro modified nucleotide
  modified_base 15: mod_base = OTHER; note = 2'-O-methyl modified nucleotide
  modified_base 16: mod_base = OTHER; note = 2'-fluoro modified nucleotide
  modified_base 17: mod_base = OTHER; note = 2'-O-methyl modified nucleotide
  modified_base 18: mod_base = OTHER; note = 2'-O-methyl modified nucleotide
  modified_base 19: mod_base = OTHER; note = 2'-O-methyl modified nucleotide with phosphorothioate linkage
  modified_base 20: mod_base = OTHER; note = 2'-O-methyl modified nucleotide with phosphorothioate linkage
  modified_base 21: mod_base = OTHER; note = 2'-O-methyl modified nucleotide
tacaatgctgaggttcatgtc

SEQ ID NO: 881 - RNA, 21 nt, synthetic construct
  source 1..21: mol_type = other RNA
  modified_base 1: mod_base = OTHER; note = 2'-O-methyl modified nucleotide with phosphorothioate linkage
  modified_base 2: mod_base = OTHER; note = 2'-fluoro modified nucleotide with phosphorothioate linkage
  modified_base 3: mod_base = OTHER; note = 2'-O-methyl modified nucleotide
  modified_base 4: mod_base = OTHER; note = 2'-O-methyl modified nucleotide
  modified_base 5: mod_base = OTHER; note = 2'-O-methyl modified nucleotide
  modified_base 6: mod_base = OTHER; note = 2'-fluoro modified nucleotide
  modified_base 7: mod_base = OTHER; note = 2'-O-methyl modified nucleotide
  modified_base 8: mod_base = OTHER; note = 2'-O-methyl modified nucleotide
  modified_base 9: mod_base = OTHER; note = 2'-O-methyl modified nucleotide
  modified_base 10: mod_base = OTHER; note = 2'-O-methyl modified nucleotide
  modified_base 11: mod_base = OTHER; note = 2'-O-methyl modified nucleotide
  modified_base 12: mod_base = OTHER; note = 2'-O-methyl modified nucleotide
  modified_base 13: mod_base = OTHER; note = 2'-O-methyl modified nucleotide
  modified_base 14: mod_base = OTHER; note = 2'-fluoro modified nucleotide
  modified_base 15: mod_base = OTHER; note = 2'-O-methyl modified nucleotide
  modified_base 16: mod_base = OTHER; note = 2'-fluoro modified nucleotide
  modified_base 17: mod_base = OTHER; note = 2'-O-methyl modified nucleotide
  modified_base 18: mod_base = OTHER; note = 2'-O-methyl modified nucleotide
  modified_base 19: mod_base = OTHER; note = 2'-O-methyl modified nucleotide with phosphorothioate linkage
  modified_base 20: mod_base = OTHER; note = 2'-O-methyl modified nucleotide with phosphorothioate linkage
  modified_base 21: mod_base = OTHER; note = 2'-O-methyl modified nucleotide
ttaagtgagccttgatcttgc

SEQ ID NO: 882 - RNA, 21 nt, synthetic construct
  source 1..21: mol_type = other RNA
  modified_base 1: mod_base = OTHER; note = 2'-O-methyl modified nucleotide with phosphorothioate linkage
  modified_base 2: mod_base = OTHER; note = 2'-fluoro modified nucleotide with phosphorothioate linkage
  modified_base 3: mod_base = OTHER; note = 2'-O-methyl modified nucleotide
  modified_base 4: mod_base = OTHER; note = 2'-O-methyl modified nucleotide
  modified_base 5: mod_base = OTHER; note = 2'-O-methyl modified nucleotide
  modified_base 6: mod_base = OTHER; note = 2'-fluoro modified nucleotide
  modified_base 7: mod_base = OTHER; note = 2'-O-methyl modified nucleotide
  modified_base 8: mod_base = OTHER; note = 2'-O-methyl modified nucleotide
  modified_base 9: mod_base = OTHER; note = 2'-O-methyl modified nucleotide
  modified_base 10: mod_base = OTHER; note = 2'-O-methyl modified nucleotide
  modified_base 11: mod_base = OTHER; note = 2'-O-methyl modified nucleotide
  modified_base 12: mod_base = OTHER; note = 2'-O-methyl modified nucleotide
  modified_base 13: mod_base = OTHER; note = 2'-O-methyl modified nucleotide
  modified_base 14: mod_base = OTHER; note = 2'-fluoro modified nucleotide
  modified_base 15: mod_base = OTHER; note = 2'-O-methyl modified nucleotide
  modified_base 16: mod_base = OTHER; note = 2'-fluoro modified nucleotide
  modified_base 17: mod_base = OTHER; note = 2'-O-methyl modified nucleotide
  modified_base 18: mod_base = OTHER; note = 2'-O-methyl modified nucleotide
  modified_base 19: mod_base = OTHER; note = 2'-O-methyl modified nucleotide with phosphorothioate linkage
  modified_base 20: mod_base = OTHER; note = 2'-O-methyl modified nucleotide with phosphorothioate linkage
  modified_base 21: mod_base = OTHER; note = 2'-O-methyl modified nucleotide
tgaacataacccagcagaaag

SEQ ID NO: 883 - RNA, 21 nt, synthetic construct
  source 1..21: mol_type = other RNA
  modified_base 1: mod_base = OTHER; note = 2'-O-methyl modified nucleotide with phosphorothioate linkage
  modified_base 2: mod_base = OTHER; note = 2'-fluoro modified nucleotide with phosphorothioate linkage
  modified_base 3: mod_base = OTHER; note = 2'-O-methyl modified nucleotide
  modified_base 4: mod_base = OTHER; note = 2'-O-methyl modified nucleotide
  modified_base 5: mod_base = OTHER; note = 2'-O-methyl modified nucleotide
  modified_base 6: mod_base = OTHER; note = 2'-fluoro modified nucleotide
  modified_base 7: mod_base = OTHER; note = 2'-O-methyl modified nucleotide
  modified_base 8: mod_base = OTHER; note = 2'-O-methyl modified nucleotide
  modified_base 9: mod_base = OTHER; note = 2'-O-methyl modified nucleotide
  modified_base 10: mod_base = OTHER; note = 2'-O-methyl modified nucleotide
  modified_base 11: mod_base = OTHER; note = 2'-O-methyl modified nucleotide
  modified_base 12: mod_base = OTHER; note = 2'-O-methyl modified nucleotide
  modified_base 13: mod_base = OTHER; note = 2'-O-methyl modified nucleotide
  modified_base 14: mod_base = OTHER; note = 2'-fluoro modified nucleotide
  modified_base 15: mod_base = OTHER; note = 2'-O-methyl modified nucleotide
  modified_base 16: mod_base = OTHER; note = 2'-fluoro modified nucleotide
  modified_base 17: mod_base = OTHER; note = 2'-O-methyl modified nucleotide
  modified_base 18: mod_base = OTHER; note = 2'-O-methyl modified nucleotide
  modified_base 19: mod_base = OTHER; note = 2'-O-methyl modified nucleotide with phosphorothioate linkage
  modified_base 20: mod_base = OTHER; note = 2'-O-methyl modified nucleotide with phosphorothioate linkage
  modified_base 21: mod_base = OTHER; note = 2'-O-methyl modified nucleotide
tatcacaatgctgaggttcat

SEQ ID NO: 884 - RNA, 21 nt, synthetic construct
  source 1..21: mol_type = other RNA
  modified_base 1: mod_base = OTHER; note = 2'-O-methyl modified nucleotide with phosphorothioate linkage
  modified_base 2: mod_base = OTHER; note = 2'-fluoro modified nucleotide with phosphorothioate linkage
  modified_base 3: mod_base = OTHER; note = 2'-O-methyl modified nucleotide
  modified_base 4: mod_base = OTHER; note = 2'-O-methyl modified nucleotide
  modified_base 5: mod_base = OTHER; note = 2'-O-methyl modified nucleotide
  modified_base 6: mod_base = OTHER; note = 2'-fluoro modified nucleotide
  modified_base 7: mod_base = OTHER; note = 2'-O-methyl modified nucleotide
  modified_base 8: mod_base = OTHER; note = 2'-O-methyl modified nucleotide
  modified_base 9: mod_base = OTHER; note = 2'-O-methyl modified nucleotide
  modified_base 10: mod_base = OTHER; note = 2'-O-methyl modified nucleotide
  modified_base 11: mod_base = OTHER; note = 2'-O-methyl modified nucleotide
  modified_base 12: mod_base = OTHER; note = 2'-O-methyl modified nucleotide
  modified_base 13: mod_base = OTHER; note = 2'-O-methyl modified nucleotide
  modified_base 14: mod_base = OTHER; note = 2'-fluoro modified nucleotide
  modified_base 15: mod_base = OTHER; note = 2'-O-methyl modified nucleotide
  modified_base 16: mod_base = OTHER; note = 2'-fluoro modified nucleotide
  modified_base 17: mod_base = OTHER; note = 2'-O-methyl modified nucleotide
  modified_base 18: mod_base = OTHER; note = 2'-O-methyl modified nucleotide
  modified_base 19: mod_base = OTHER; note = 2'-O-methyl modified nucleotide with phosphorothioate linkage
  modified_base 20: mod_base = OTHER; note = 2'-O-methyl modified nucleotide with phosphorothioate linkage
  modified_base 21: mod_base = OTHER; note = 2'-O-methyl modified nucleotide
ttttaggcttccataagtgag

SEQ ID NO: 885 - RNA, 21 nt, synthetic construct
  source 1..21: mol_type = other RNA
  modified_base 1: mod_base = OTHER; note = 2'-O-methyl modified nucleotide with phosphorothioate linkage
  modified_base 2: mod_base = OTHER; note = 2'-fluoro modified nucleotide with phosphorothioate linkage
  modified_base 3: mod_base = OTHER; note = 2'-O-methyl modified nucleotide
  modified_base 4: mod_base = OTHER; note = 2'-O-methyl modified nucleotide
  modified_base 5: mod_base = OTHER; note = 2'-O-methyl modified nucleotide
  modified_base 6: mod_base = OTHER; note = 2'-fluoro modified nucleotide
  modified_base 7: mod_base = OTHER; note = 2'-O-methyl modified nucleotide
  modified_base 8: mod_base = OTHER; note = 2'-O-methyl modified nucleotide
  modified_base 9: mod_base = OTHER; note = 2'-O-methyl modified nucleotide
  modified_base 10: mod_base = OTHER; note = 2'-O-methyl modified nucleotide
  modified_base 11: mod_base = OTHER; note = 2'-O-methyl modified nucleotide
  modified_base 12: mod_base = OTHER; note = 2'-O-methyl modified nucleotide
  modified_base 13: mod_base = OTHER; note = 2'-O-methyl modified nucleotide
  modified_base 14: mod_base = OTHER; note = 2'-fluoro modified nucleotide
  modified_base 15: mod_base = OTHER; note = 2'-O-methyl modified nucleotide
  modified_base 16: mod_base = OTHER; note = 2'-fluoro modified nucleotide
  modified_base 17: mod_base = OTHER; note = 2'-O-methyl modified nucleotide
  modified_base 18: mod_base = OTHER; note = 2'-O-methyl modified nucleotide
  modified_base 19: mod_base = OTHER; note = 2'-O-methyl modified nucleotide with phosphorothioate linkage
  modified_base 20: mod_base = OTHER; note = 2'-O-methyl modified nucleotide with phosphorothioate linkage
  modified_base 21: mod_base = OTHER; note = 2'-O-methyl modified nucleotide
tgacatagcgcatgtattgtg

SEQ ID NO: 886 - RNA, 21 nt, synthetic construct
  source 1..21: mol_type = other RNA
  modified_base 1: mod_base = OTHER; note = 2'-O-methyl modified nucleotide with phosphorothioate linkage
  modified_base 2: mod_base = OTHER; note = 2'-fluoro modified nucleotide with phosphorothioate linkage
  modified_base 3: mod_base = OTHER; note = 2'-O-methyl modified nucleotide
  modified_base 4: mod_base = OTHER; note = 2'-O-methyl modified nucleotide
  modified_base 5: mod_base = OTHER; note = 2'-O-methyl modified nucleotide
  modified_base 6: mod_base = OTHER; note = 2'-fluoro modified nucleotide
  modified_base 7: mod_base = OTHER; note = 2'-O-methyl modified nucleotide
  modified_base 8: mod_base = OTHER; note = 2'-O-methyl modified nucleotide
  modified_base 9: mod_base = OTHER; note = 2'-O-methyl modified nucleotide
  modified_base 10: mod_base = OTHER; note = 2'-O-methyl modified nucleotide
  modified_base 11: mod_base = OTHER; note = 2'-O-methyl modified nucleotide
  modified_base 12: mod_base = OTHER; note = 2'-O-methyl modified nucleotide
  modified_base 13: mod_base = OTHER; note = 2'-O-methyl modified nucleotide
  modified_base 14: mod_base = OTHER; note = 2'-fluoro modified nucleotide
  modified_base 15: mod_base = OTHER; note = 2'-O-methyl modified nucleotide
  modified_base 16: mod_base = OTHER; note = 2'-fluoro modified nucleotide
  modified_base 17: mod_base = OTHER; note = 2'-O-methyl modified nucleotide
  modified_base 18: mod_base = OTHER; note = 2'-O-methyl modified nucleotide
  modified_base 19: mod_base = OTHER; note = 2'-O-methyl modified nucleotide with phosphorothioate linkage
  modified_base 20: mod_base = OTHER; note = 2'-O-methyl modified nucleotide with phosphorothioate linkage
  modified_base 21: mod_base = OTHER; note = 2'-O-methyl modified nucleotide
tagcgagagcatgatgaagaa

SEQ ID NO: 887 - RNA, 21 nt, synthetic construct
  source 1..21: mol_type = other RNA
  modified_base 1: mod_base = OTHER; note = 2'-O-methyl modified nucleotide with phosphorothioate linkage
  modified_base 2: mod_base = OTHER; note = 2'-fluoro modified nucleotide with phosphorothioate linkage
  modified_base 3: mod_base = OTHER; note = 2'-O-methyl modified nucleotide
  modified_base 4: mod_base = OTHER; note = 2'-O-methyl modified nucleotide
  modified_base 5: mod_base = OTHER; note = 2'-O-methyl modified nucleotide
  modified_base 6: mod_base = OTHER; note = 2'-fluoro modified nucleotide
  modified_base 7: mod_base = OTHER; note = 2'-O-methyl modified nucleotide
  modified_base 8: mod_base = OTHER; note = 2'-O-methyl modified nucleotide
  modified_base 9: mod_base = OTHER; note = 2'-O-methyl modified nucleotide
  modified_base 10: mod_base = OTHER; note = 2'-O-methyl modified nucleotide
  modified_base 11: mod_base = OTHER; note = 2'-O-methyl modified nucleotide
  modified_base 12: mod_base = OTHER; note = 2'-O-methyl modified nucleotide
  modified_base 13: mod_base = OTHER; note = 2'-O-methyl modified nucleotide
  modified_base 14: mod_base = OTHER; note = 2'-fluoro modified nucleotide
  modified_base 15: mod_base = OTHER; note = 2'-O-methyl modified nucleotide
  modified_base 16: mod_base = OTHER; note = 2'-fluoro modified nucleotide
  modified_base 17: mod_base = OTHER; note = 2'-O-methyl modified nucleotide
  modified_base 18: mod_base = OTHER; note = 2'-O-methyl modified nucleotide
  modified_base 19: mod_base = OTHER; note = 2'-O-methyl modified nucleotide with phosphorothioate linkage
  modified_base 20: mod_base = OTHER; note = 2'-O-methyl modified nucleotide with phosphorothioate linkage
  modified_base 21: mod_base = OTHER; note = 2'-O-methyl modified nucleotide
tgcccagcgagagcatgatga

SEQ ID NO: 888 - RNA, 21 nt, synthetic construct
  source 1..21: mol_type = other RNA
  modified_base 1: mod_base = OTHER; note = 2'-O-methyl modified nucleotide with phosphorothioate linkage
  modified_base 2: mod_base = OTHER; note = 2'-fluoro modified nucleotide with phosphorothioate linkage
  modified_base 3: mod_base = OTHER; note = 2'-O-methyl modified nucleotide
  modified_base 4: mod_base = OTHER; note = 2'-O-methyl modified nucleotide
  modified_base 5: mod_base = OTHER; note = 2'-O-methyl modified nucleotide
  modified_base 6: mod_base = OTHER; note = 2'-fluoro modified nucleotide
  modified_base 7: mod_base = OTHER; note = 2'-O-methyl modified nucleotide
  modified_base 8: mod_base = OTHER; note = 2'-O-methyl modified nucleotide
  modified_base 9: mod_base = OTHER; note = 2'-O-methyl modified nucleotide
  modified_base 10: mod_base = OTHER; note = 2'-O-methyl modified nucleotide
  modified_base 11: mod_base = OTHER; note = 2'-O-methyl modified nucleotide
  modified_base 12: mod_base = OTHER; note = 2'-O-methyl modified nucleotide
  modified_base 13: mod_base = OTHER; note = 2'-O-methyl modified nucleotide
  modified_base 14: mod_base = OTHER; note = 2'-fluoro modified nucleotide
  modified_base 15: mod_base = OTHER; note = 2'-O-methyl modified nucleotide
  modified_base 16: mod_base = OTHER; note = 2'-fluoro modified nucleotide
  modified_base 17: mod_base = OTHER; note = 2'-O-methyl modified nucleotide
  modified_base 18: mod_base = OTHER; note = 2'-O-methyl modified nucleotide
  modified_base 19: mod_base = OTHER; note = 2'-O-methyl modified nucleotide with phosphorothioate linkage
  modified_base 20: mod_base = OTHER; note = 2'-O-methyl modified nucleotide with phosphorothioate linkage
  modified_base 21: mod_base = OTHER; note = 2'-O-methyl modified nucleotide
taaacttggaatgggatttgg

SEQ ID NO: 889 - RNA, 21 nt, synthetic construct
  source 1..21: mol_type = other RNA
  modified_base 1: mod_base = OTHER; note = 2'-O-methyl modified nucleotide with phosphorothioate linkage
  modified_base 2: mod_base = OTHER; note = 2'-fluoro modified nucleotide with phosphorothioate linkage
  modified_base 3: mod_base = OTHER; note = 2'-O-methyl modified nucleotide
  modified_base 4: mod_base = OTHER; note = 2'-O-methyl modified nucleotide
  modified_base 5: mod_base = OTHER; note = 2'-O-methyl modified nucleotide
  modified_base 6: mod_base = OTHER; note = 2'-fluoro modified nucleotide
  modified_base 7: mod_base = OTHER; note = 2'-O-methyl modified nucleotide
  modified_base 8: mod_base = OTHER; note = 2'-O-methyl modified nucleotide
  modified_base 9: mod_base = OTHER; note = 2'-O-methyl modified nucleotide
  modified_base 10: mod_base = OTHER; note = 2'-O-methyl modified nucleotide
  modified_base 11: mod_base = OTHER; note = 2'-O-methyl modified nucleotide
  modified_base 12: mod_base = OTHER; note = 2'-O-methyl modified nucleotide
  modified_base 13: mod_base = OTHER; note = 2'-O-methyl modified nucleotide
  modified_base 14: mod_base = OTHER; note = 2'-fluoro modified nucleotide
  modified_base 15: mod_base = OTHER; note = 2'-O-methyl modified nucleotide
  modified_base 16: mod_base = OTHER; note = 2'-fluoro modified nucleotide
  modified_base 17: mod_base = OTHER; note = 2'-O-methyl modified nucleotide
  modified_base 18: mod_base = OTHER; note = 2'-O-methyl modified nucleotide
  modified_base 19: mod_base = OTHER; note = 2'-O-methyl modified nucleotide with phosphorothioate linkage
  modified_base 20: mod_base = OTHER; note = 2'-O-methyl modified nucleotide with phosphorothioate linkage
  modified_base 21: mod_base = OTHER; note = 2'-O-methyl modified nucleotide
tgctggaaaatcatgtagagg

SEQ ID NO: 890 - RNA, 21 nt, synthetic construct
  source 1..21: mol_type = other RNA
  modified_base 1: mod_base = OTHER; note = 2'-O-methyl modified nucleotide with phosphorothioate linkage
  modified_base 2: mod_base = OTHER; note = 2'-fluoro modified nucleotide with phosphorothioate linkage
  modified_base 3: mod_base = OTHER; note = 2'-O-methyl modified nucleotide
  modified_base 4: mod_base = OTHER; note = 2'-O-methyl modified nucleotide
  modified_base 5: mod_base = OTHER; note = 2'-O-methyl modified nucleotide
  modified_base 6: mod_base = OTHER; note = 2'-fluoro modified nucleotide
  modified_base 7: mod_base = OTHER; note = 2'-O-methyl modified nucleotide
  modified_base 8: mod_base = OTHER; note = 2'-O-methyl modified nucleotide
  modified_base 9: mod_base = OTHER; note = 2'-O-methyl modified nucleotide
  modified_base 10: mod_base = OTHER; note = 2'-O-methyl modified nucleotide
  modified_base 11: mod_base = OTHER; note = 2'-O-methyl modified nucleotide
  modified_base 12: mod_base = OTHER; note = 2'-O-methyl modified nucleotide
  modified_base 13: mod_base = OTHER; note = 2'-O-methyl modified nucleotide
  modified_base 14: mod_base = OTHER; note = 2'-fluoro modified nucleotide
  modified_base 15: mod_base = OTHER; note = 2'-O-methyl modified nucleotide
  modified_base 16: mod_base = OTHER; note = 2'-fluoro modified nucleotide
  modified_base 17: mod_base = OTHER; note = 2'-O-methyl modified nucleotide
  modified_base 18: mod_base = OTHER; note = 2'-O-methyl modified nucleotide
  modified_base 19: mod_base = OTHER; note = 2'-O-methyl modified nucleotide with phosphorothioate linkage
  modified_base 20: mod_base = OTHER; note = 2'-O-methyl modified nucleotide with phosphorothioate linkage
  modified_base 21: mod_base = OTHER; note = 2'-O-methyl modified nucleotide
tagagaacataacccagcaga

SEQ ID NO: 891 - RNA, 21 nt, synthetic construct
  source 1..21: mol_type = other RNA
  modified_base 1: mod_base = OTHER; note = 2'-O-methyl modified nucleotide with phosphorothioate linkage
  modified_base 2: mod_base = OTHER; note = 2'-fluoro modified nucleotide with phosphorothioate linkage
  modified_base 3: mod_base = OTHER; note = 2'-O-methyl modified nucleotide
  modified_base 4: mod_base = OTHER; note = 2'-O-methyl modified nucleotide
  modified_base 5: mod_base = OTHER; note = 2'-O-methyl modified nucleotide
  modified_base 6: mod_base = OTHER; note = 2'-fluoro modified nucleotide
  modified_base 7: mod_base = OTHER; note = 2'-O-methyl modified nucleotide
  modified_base 8: mod_base = OTHER; note = 2'-O-methyl modified nucleotide
  modified_base 9: mod_base = OTHER; note = 2'-O-methyl modified nucleotide
  modified_base 10: mod_base = OTHER; note = 2'-O-methyl modified nucleotide
  modified_base 11: mod_base = OTHER; note = 2'-O-methyl modified nucleotide
  modified_base 12: mod_base = OTHER; note = 2'-O-methyl modified nucleotide
  modified_base 13: mod_base = OTHER; note = 2'-O-methyl modified nucleotide
  modified_base 14: mod_base = OTHER; note = 2'-fluoro modified nucleotide
  modified_base 15: mod_base = OTHER; note = 2'-O-methyl modified nucleotide
  modified_base 16: mod_base = OTHER; note = 2'-fluoro modified nucleotide
  modified_base 17: mod_base = OTHER; note = 2'-O-methyl modified nucleotide
  modified_base 18: mod_base = OTHER; note = 2'-O-methyl modified nucleotide
  modified_base 19: mod_base = OTHER; note = 2'-O-methyl modified nucleotide with phosphorothioate linkage
  modified_base 20: mod_base = OTHER; note = 2'-O-methyl modified nucleotide with phosphorothioate linkage
  modified_base 21: mod_base = OTHER; note = 2'-O-methyl modified nucleotide
tgatttgaggacgatccctat

SEQ ID NO: 892 - RNA, 21 nt, synthetic construct
  source 1..21: mol_type = other RNA
  modified_base 1: mod_base = OTHER; note = 2'-O-methyl modified nucleotide with phosphorothioate linkage
  modified_base 2: mod_base = OTHER; note = 2'-fluoro modified nucleotide with phosphorothioate linkage
  modified_base 3: mod_base = OTHER; note = 2'-O-methyl modified nucleotide
  modified_base 4: mod_base = OTHER; note = 2'-O-methyl modified nucleotide
  modified_base 5: mod_base = OTHER; note = 2'-O-methyl modified nucleotide
  modified_base 6: mod_base = OTHER; note = 2'-fluoro modified nucleotide
  modified_base 7: mod_base = OTHER; note = 2'-O-methyl modified nucleotide
  modified_base 8: mod_base = OTHER; note = 2'-O-methyl modified nucleotide
  modified_base 9: mod_base = OTHER; note = 2'-O-methyl modified nucleotide
  modified_base 10: mod_base = OTHER; note = 2'-O-methyl modified nucleotide
  modified_base 11: mod_base = OTHER; note = 2'-O-methyl modified nucleotide
  modified_base 12: mod_base = OTHER; note = 2'-O-methyl modified nucleotide
  modified_base 13: mod_base = OTHER; note = 2'-O-methyl modified nucleotide
  modified_base 14: mod_base = OTHER; note = 2'-fluoro modified nucleotide
  modified_base 15: mod_base = OTHER; note = 2'-O-methyl modified nucleotide
  modified_base 16: mod_base = OTHER; note = 2'-fluoro modified nucleotide
  modified_base 17: mod_base = OTHER; note = 2'-O-methyl modified nucleotide
  modified_base 18: mod_base = OTHER; note = 2'-O-methyl modified nucleotide
  modified_base 19: mod_base = OTHER; note = 2'-O-methyl modified nucleotide with phosphorothioate linkage
  modified_base 20: mod_base = OTHER; note = 2'-O-methyl modified nucleotide with phosphorothioate linkage
  modified_base 21: mod_base = OTHER; note = 2'-O-methyl modified nucleotide
tgggcatgatgccatactgtg

SEQ ID NO: 893 - RNA, 21 nt, synthetic construct
  source 1..21: mol_type = other RNA
  modified_base 1: mod_base = OTHER; note = 2'-O-methyl modified nucleotide with phosphorothioate linkage
  modified_base 2: mod_base = OTHER; note = 2'-fluoro modified nucleotide with phosphorothioate linkage
  modified_base 3: mod_base = OTHER; note = 2'-O-methyl modified nucleotide
  modified_base 4: mod_base = OTHER; note = 2'-O-methyl modified nucleotide
  modified_base 5: mod_base = OTHER; note = 2'-O-methyl modified nucleotide
  modified_base 6: mod_base = OTHER; note = 2'-fluoro modified nucleotide
  modified_base 7: mod_base = OTHER; note = 2'-O-methyl modified nucleotide
  modified_base 8: mod_base = OTHER; note = 2'-O-methyl modified nucleotide
  modified_base 9: mod_base = OTHER; note = 2'-O-methyl modified nucleotide
  modified_base 10: mod_base = OTHER; note = 2'-O-methyl modified nucleotide
  modified_base 11: mod_base = OTHER; note = 2'-O-methyl modified nucleotide
  modified_base 12: mod_base = OTHER; note = 2'-O-methyl modified nucleotide
  modified_base 13: mod_base = OTHER; note = 2'-O-methyl modified nucleotide
  modified_base 14: mod_base = OTHER; note = 2'-fluoro modified nucleotide
  modified_base 15: mod_base = OTHER; note = 2'-O-methyl modified nucleotide
  modified_base 16: mod_base = OTHER; note = 2'-fluoro modified nucleotide
  modified_base 17: mod_base = OTHER; note = 2'-O-methyl modified nucleotide
  modified_base 18: mod_base = OTHER; note = 2'-O-methyl modified nucleotide
  modified_base 19: mod_base = OTHER; note = 2'-O-methyl modified nucleotide with phosphorothioate linkage
  modified_base 20: mod_base = OTHER; note = 2'-O-methyl modified nucleotide with phosphorothioate linkage
  modified_base 21: mod_base = OTHER; note = 2'-O-methyl modified nucleotide
tcagcgagagcatgatgaaga

SEQ ID NO: 894 - RNA, 21 nt, synthetic construct
  source 1..21: mol_type = other RNA
  modified_base 1: mod_base = OTHER; note = 2'-O-methyl modified nucleotide with phosphorothioate linkage
  modified_base 2: mod_base = OTHER; note = 2'-fluoro modified nucleotide with phosphorothioate linkage
  modified_base 3: mod_base = OTHER; note = 2'-O-methyl modified nucleotide
  modified_base 4: mod_base = OTHER; note = 2'-O-methyl modified nucleotide
  modified_base 5: mod_base = OTHER; note = 2'-O-methyl modified nucleotide
  modified_base 6: mod_base = OTHER; note = 2'-fluoro modified nucleotide
  modified_base 7: mod_base = OTHER; note = 2'-O-methyl modified nucleotide
  modified_base 8: mod_base = OTHER; note = 2'-O-methyl modified nucleotide
  modified_base 9: mod_base = OTHER; note = 2'-O-methyl modified nucleotide
  modified_base 10: mod_base = OTHER; note = 2'-O-methyl modified nucleotide
  modified_base 11: mod_base = OTHER; note = 2'-O-methyl modified nucleotide
  modified_base 12: mod_base = OTHER; note = 2'-O-methyl modified nucleotide
  modified_base 13: mod_base = OTHER; note = 2'-O-methyl modified nucleotide
  modified_base 14: mod_base = OTHER; note = 2'-fluoro modified nucleotide
  modified_base 15: mod_base = OTHER; note = 2'-O-methyl modified nucleotide
  modified_base 16: mod_base = OTHER; note = 2'-fluoro modified nucleotide
  modified_base 17: mod_base = OTHER; note = 2'-O-methyl modified nucleotide
  modified_base 18: mod_base = OTHER; note = 2'-O-methyl modified nucleotide
  modified_base 19: mod_base = OTHER; note = 2'-O-methyl modified nucleotide with phosphorothioate linkage
  modified_base 20: mod_base = OTHER; note = 2'-O-methyl modified nucleotide with phosphorothioate linkage
  modified_base 21: mod_base = OTHER; note = 2'-O-methyl modified nucleotide
ttggtgcaaggaatgagaacc

SEQ ID NO: 895 - RNA, 21 nt, synthetic construct
  source 1..21: mol_type = other RNA
  modified_base 1: mod_base = OTHER; note = 2'-O-methyl modified nucleotide with phosphorothioate linkage
  modified_base 2: mod_base = OTHER; note = 2'-fluoro modified nucleotide with phosphorothioate linkage
  modified_base 3: mod_base = OTHER; note = 2'-O-methyl modified nucleotide
  modified_base 4: mod_base = OTHER; note = 2'-O-methyl modified nucleotide
  modified_base 5: mod_base = OTHER; note = 2'-O-methyl modified nucleotide
  modified_base 6: mod_base = OTHER; note = 2'-fluoro modified nucleotide
  modified_base 7: mod_base = OTHER; note = 2'-O-methyl modified nucleotide
  modified_base 8: mod_base = OTHER; note = 2'-O-methyl modified nucleotide
  modified_base 9: mod_base = OTHER; note = 2'-O-methyl modified nucleotide
  modified_base 10: mod_base = OTHER; note = 2'-O-methyl modified nucleotide
  modified_base 11: mod_base = OTHER; note = 2'-O-methyl modified nucleotide
  modified_base 12: mod_base = OTHER; note = 2'-O-methyl modified nucleotide
  modified_base 13: mod_base = OTHER; note = 2'-O-methyl modified nucleotide
  modified_base 14: mod_base = OTHER; note = 2'-fluoro modified nucleotide
  modified_base 15: mod_base = OTHER; note = 2'-O-methyl modified nucleotide
  modified_base 16: mod_base = OTHER; note = 2'-fluoro modified nucleotide
  modified_base 17: mod_base = OTHER; note = 2'-O-methyl modified nucleotide
  modified_base 18: mod_base = OTHER; note = 2'-O-methyl modified nucleotide
  modified_base 19: mod_base = OTHER; note = 2'-O-methyl modified nucleotide with phosphorothioate linkage
  modified_base 20: mod_base = OTHER; note = 2'-O-methyl modified nucleotide with phosphorothioate linkage
  modified_base 21: mod_base = OTHER; note = 2'-O-methyl modified nucleotide
tgaactccatggtgcagccca

SEQ ID NO: 896 - RNA, 21 nt, synthetic construct
  source 1..21: mol_type = other RNA
  modified_base 1: mod_base = OTHER; note = 2'-O-methyl modified nucleotide with phosphorothioate linkage
  modified_base 2: mod_base = OTHER; note = 2'-fluoro modified nucleotide with phosphorothioate linkage
  modified_base 3: mod_base = OTHER; note = 2'-O-methyl modified nucleotide
  modified_base 4: mod_base = OTHER; note = 2'-O-methyl modified nucleotide
  modified_base 5: mod_base = OTHER; note = 2'-O-methyl modified nucleotide
  modified_base 6: mod_base = OTHER; note = 2'-fluoro modified nucleotide
  modified_base 7: mod_base = OTHER; note = 2'-O-methyl modified nucleotide
  modified_base 8: mod_base = OTHER; note = 2'-O-methyl modified nucleotide
  modified_base 9: mod_base = OTHER; note = 2'-O-methyl modified nucleotide
  modified_base 10: mod_base = OTHER; note = 2'-O-methyl modified nucleotide
  modified_base 11: mod_base = OTHER; note = 2'-O-methyl modified nucleotide
  modified_base 12: mod_base = OTHER; note = 2'-O-methyl modified nucleotide
  modified_base 13: mod_base = OTHER; note = 2'-O-methyl modified nucleotide
  modified_base 14: mod_base = OTHER; note = 2'-fluoro modified nucleotide
  modified_base 15: mod_base = OTHER; note = 2'-O-methyl modified nucleotide
  modified_base 16: mod_base = OTHER; note = 2'-fluoro modified nucleotide
  modified_base 17: mod_base = OTHER; note = 2'-O-methyl modified nucleotide
  modified_base 18: mod_base = OTHER; note = 2'-O-methyl modified nucleotide
  modified_base 19: mod_base = OTHER; note = 2'-O-methyl modified nucleotide with phosphorothioate linkage
  modified_base 20: mod_base = OTHER; note = 2'-O-methyl modified nucleotide with phosphorothioate linkage
  modified_base 21: mod_base = OTHER; note = 2'-O-methyl modified nucleotide
tggggcgcttgccaaagttgg

SEQ ID NO: 897 - RNA, 21 nt, synthetic construct
  source 1..21: mol_type = other RNA
  modified_base 1: mod_base = OTHER; note = 2'-O-methyl modified nucleotide with phosphorothioate linkage
  modified_base 2: mod_base = OTHER; note = 2'-fluoro modified nucleotide with phosphorothioate linkage
  modified_base 3: mod_base = OTHER; note = 2'-O-methyl modified nucleotide
  modified_base 4: mod_base = OTHER; note = 2'-O-methyl modified nucleotide
  modified_base 5: mod_base = OTHER; note = 2'-O-methyl modified nucleotide
  modified_base 6: mod_base = OTHER; note = 2'-fluoro modified nucleotide
  modified_base 7: mod_base = OTHER; note = 2'-O-methyl modified nucleotide
  modified_base 8: mod_base = OTHER; note = 2'-O-methyl modified nucleotide
  modified_base 9: mod_base = OTHER; note = 2'-O-methyl modified nucleotide
  modified_base 10: mod_base = OTHER; note = 2'-O-methyl modified nucleotide
  modified_base 11: mod_base = OTHER; note = 2'-O-methyl modified nucleotide
  modified_base 12: mod_base = OTHER; note = 2'-O-methyl modified nucleotide
  modified_base 13: mod_base = OTHER; note = 2'-O-methyl modified nucleotide
  modified_base 14: mod_base = OTHER; note = 2'-fluoro modified nucleotide
  modified_base 15: mod_base = OTHER; note = 2'-O-methyl modified nucleotide
  modified_base 16: mod_base = OTHER; note = 2'-fluoro modified nucleotide
  modified_base 17: mod_base = OTHER; note = 2'-O-methyl modified nucleotide
  modified_base 18: mod_base = OTHER; note = 2'-O-methyl modified nucleotide
  modified_base 19: mod_base = OTHER; note = 2'-O-methyl modified nucleotide with phosphorothioate linkage
  modified_base 20: mod_base = OTHER; note = 2'-O-methyl modified nucleotide with phosphorothioate linkage
  modified_base 21: mod_base = OTHER; note = 2'-O-methyl modified nucleotide
taaaagtggtccaatgacttc

SEQ ID NO: 898 - RNA, 21 nt, synthetic construct
  source 1..21: mol_type = other RNA
  modified_base 1: mod_base = OTHER; note = 2'-O-methyl modified nucleotide with phosphorothioate linkage
  modified_base 2: mod_base = OTHER; note = 2'-fluoro modified nucleotide with phosphorothioate linkage
  modified_base 3: mod_base = OTHER; note = 2'-O-methyl modified nucleotide
  modified_base 4: mod_base = OTHER; note = 2'-O-methyl modified nucleotide
  modified_base 5: mod_base = OTHER; note = 2'-O-methyl modified nucleotide
  modified_base 6: mod_base = OTHER; note = 2'-fluoro modified nucleotide
  modified_base 7: mod_base = OTHER; note = 2'-O-methyl modified nucleotide
  modified_base 8: mod_base = OTHER; note = 2'-O-methyl modified nucleotide
  modified_base 9: mod_base = OTHER; note = 2'-O-methyl modified nucleotide
  modified_base 10: mod_base = OTHER; note = 2'-O-methyl modified nucleotide
  modified_base 11: mod_base = OTHER; note = 2'-O-methyl modified nucleotide
  modified_base 12: mod_base = OTHER; note = 2'-O-methyl modified nucleotide
  modified_base 13: mod_base = OTHER; note = 2'-O-methyl modified nucleotide
  modified_base 14: mod_base = OTHER; note = 2'-fluoro modified nucleotide
  modified_base 15: mod_base = OTHER; note = 2'-O-methyl modified nucleotide
  modified_base 16: mod_base = OTHER; note = 2'-fluoro modified nucleotide
  modified_base 17: mod_base = OTHER; note = 2'-O-methyl modified nucleotide
  modified_base 18: mod_base = OTHER; note = 2'-O-methyl modified nucleotide
  modified_base 19: mod_base = OTHER; note = 2'-O-methyl modified nucleotide with phosphorothioate linkage
  modified_base 20: mod_base = OTHER; note = 2'-O-methyl modified nucleotide with phosphorothioate linkage
  modified_base 21: mod_base = OTHER; note = 2'-O-methyl modified nucleotide
ttgccatactgtgccaccagg

SEQ ID NO: 899 - RNA, 21 nt, synthetic construct
  source 1..21: mol_type = other RNA
  modified_base 1: mod_base = OTHER; note = 2'-O-methyl modified nucleotide with phosphorothioate linkage
  modified_base 2: mod_base = OTHER; note = 2'-fluoro modified nucleotide with phosphorothioate linkage
  modified_base 3: mod_base = OTHER; note = 2'-O-methyl modified nucleotide
  modified_base 4: mod_base = OTHER; note = 2'-O-methyl modified nucleotide
  modified_base 5: mod_base = OTHER; note = 2'-O-methyl modified nucleotide
  modified_base 6: mod_base = OTHER; note = 2'-fluoro modified nucleotide
  modified_base 7: mod_base = OTHER; note = 2'-O-methyl modified nucleotide
  modified_base 8: mod_base = OTHER; note = 2'-O-methyl modified nucleotide
  modified_base 9: mod_base = OTHER; note = 2'-O-methyl modified nucleotide
  modified_base 10: mod_base = OTHER; note = 2'-O-methyl modified nucleotide
  modified_base 11: mod_base = OTHER; note = 2'-O-methyl modified nucleotide
  modified_base 12: mod_base = OTHER; note = 2'-O-methyl modified nucleotide
  modified_base 13: mod_base = OTHER; note = 2'-O-methyl modified nucleotide
  modified_base 14: mod_base = OTHER; note = 2'-fluoro modified nucleotide
  modified_base 15: mod_base = OTHER; note = 2'-O-methyl modified nucleotide
  modified_base 16: mod_base = OTHER; note = 2'-fluoro modified nucleotide
  modified_base 17: mod_base = OTHER; note = 2'-O-methyl modified nucleotide
  modified_base 18: mod_base = OTHER; note = 2'-O-methyl modified nucleotide
  modified_base 19: mod_base = OTHER; note = 2'-O-methyl modified nucleotide with phosphorothioate linkage
  modified_base 20: mod_base = OTHER; note = 2'-O-methyl modified nucleotide with phosphorothioate linkage
  modified_base 21: mod_base = OTHER; note = 2'-O-methyl modified nucleotide
ttgatgatcatccctcccttg

SEQ ID NO: 900 - RNA, 21 nt, synthetic construct
  source 1..21: mol_type = other RNA
  modified_base 1: mod_base = OTHER; note = 2'-O-methyl modified nucleotide with phosphorothioate linkage
  modified_base 2: mod_base = OTHER; note = 2'-fluoro modified nucleotide with phosphorothioate linkage
  modified_base 3: mod_base = OTHER; note = 2'-O-methyl modified nucleotide
  modified_base 4: mod_base = OTHER; note = 2'-O-methyl modified nucleotide
  modified_base 5: mod_base = OTHER; note = 2'-O-methyl modified nucleotide
  modified_base 6: mod_base = OTHER; note = 2'-fluoro modified nucleotide
  modified_base 7: mod_base = OTHER; note = 2'-O-methyl modified nucleotide
  modified_base 8: mod_base = OTHER; note = 2'-O-methyl modified nucleotide
  modified_base 9: mod_base = OTHER; note = 2'-O-methyl modified nucleotide
  modified_base 10: mod_base = OTHER; note = 2'-O-methyl modified nucleotide
  modified_base 11: mod_base = OTHER; note = 2'-O-methyl modified nucleotide
  modified_base 12: mod_base = OTHER; note = 2'-O-methyl modified nucleotide
  modified_base 13: mod_base = OTHER; note = 2'-O-methyl modified nucleotide
  modified_base 14: mod_base = OTHER; note = 2'-fluoro modified nucleotide
  modified_base 15: mod_base = OTHER; note = 2'-O-methyl modified nucleotide
  modified_base 16: mod_base = OTHER; note = 2'-fluoro modified nucleotide
  modified_base 17: mod_base = OTHER; note = 2'-O-methyl modified nucleotide
  modified_base 18: mod_base = OTHER; note = 2'-O-methyl modified nucleotide
  modified_base 19: mod_base = OTHER; note = 2'-O-methyl modified nucleotide with phosphorothioate linkage
  modified_base 20: mod_base = OTHER; note = 2'-O-methyl modified nucleotide with phosphorothioate linkage
  modified_base 21: mod_base = OTHER; note = 2'-O-methyl modified nucleotide
ttggtccaatgacttcaggtg

SEQ ID NO: 901 - RNA, 21 nt, synthetic construct
  source 1..21: mol_type = other RNA
  modified_base 1: mod_base = OTHER; note = 2'-O-methyl modified nucleotide with phosphorothioate linkage
  modified_base 2: mod_base = OTHER; note = 2'-fluoro modified nucleotide with phosphorothioate linkage
  modified_base 3: mod_base = OTHER; note = 2'-O-methyl modified nucleotide
  modified_base 4: mod_base = OTHER; note = 2'-O-methyl modified nucleotide
  modified_base 5: mod_base = OTHER; note = 2'-O-methyl modified nucleotide
  modified_base 6: mod_base = OTHER; note = 2'-fluoro modified nucleotide
  modified_base 7: mod_base = OTHER; note = 2'-O-methyl modified nucleotide
  modified_base 8: mod_base = OTHER; note = 2'-O-methyl modified nucleotide
  modified_base 9: mod_base = OTHER; note = 2'-O-methyl modified nucleotide
  modified_base 10: mod_base = OTHER; note = 2'-O-methyl modified nucleotide
  modified_base 11: mod_base = OTHER; note = 2'-O-methyl modified nucleotide
  modified_base 12: mod_base = OTHER; note = 2'-O-methyl modified nucleotide
  modified_base 13: mod_base = OTHER; note = 2'-O-methyl modified nucleotide
  modified_base 14: mod_base = OTHER; note = 2'-fluoro modified nucleotide
  modified_base 15: mod_base = OTHER; note = 2'-O-methyl modified nucleotide
  modified_base 16: mod_base = OTHER; note = 2'-fluoro modified nucleotide
  modified_base 17: mod_base = OTHER; note = 2'-O-methyl modified nucleotide
  modified_base 18: mod_base = OTHER; note = 2'-O-methyl modified nucleotide
  modified_base 19: mod_base = OTHER; note = 2'-O-methyl modified nucleotide with phosphorothioate linkage
  modified_base 20: mod_base = OTHER; note = 2'-O-methyl modified nucleotide with phosphorothioate linkage
  modified_base 21: mod_base = OTHER; note = 2'-O-methyl modified nucleotide
tttagttcaggaattgagtga

SEQ ID NO: 902 - RNA, 21 nt, synthetic construct
  source 1..21: mol_type = other RNA
  modified_base 1: mod_base = OTHER; note = 2'-O-methyl modified nucleotide with phosphorothioate linkage
  modified_base 2: mod_base = OTHER; note = 2'-fluoro modified nucleotide with phosphorothioate linkage
  modified_base 3: mod_base = OTHER; note = 2'-O-methyl modified nucleotide
  modified_base 4: mod_base = OTHER; note = 2'-O-methyl modified nucleotide
  modified_base 5: mod_base = OTHER; note = 2'-O-methyl modified nucleotide
  modified_base 6: mod_base = OTHER; note = 2'-fluoro modified nucleotide
  modified_base 7: mod_base = OTHER; note = 2'-O-methyl modified nucleotide
  modified_base 8: mod_base = OTHER; note = 2'-O-methyl modified nucleotide
  modified_base 9: mod_base = OTHER; note = 2'-O-methyl modified nucleotide
  modified_base 10: mod_base = OTHER; note = 2'-O-methyl modified nucleotide
  modified_base 11: mod_base = OTHER; note = 2'-O-methyl modified nucleotide
  modified_base 12: mod_base = OTHER; note = 2'-O-methyl modified nucleotide
  modified_base 13: mod_base = OTHER; note = 2'-O-methyl modified nucleotide
  modified_base 14: mod_base = OTHER; note = 2'-fluoro modified nucleotide
  modified_base 15: mod_base = OTHER; note = 2'-O-methyl modified nucleotide
  modified_base 16: mod_base = OTHER; note = 2'-fluoro modified nucleotide
  modified_base 17: mod_base = OTHER; note = 2'-O-methyl modified nucleotide
  modified_base 18: mod_base = OTHER; note = 2'-O-methyl modified nucleotide
  modified_base 19: mod_base = OTHER; note = 2'-O-methyl modified nucleotide with phosphorothioate linkage
  modified_base 20: mod_base = OTHER; note = 2'-O-methyl modified nucleotide with phosphorothioate linkage
  modified_base 21: mod_base = OTHER; note = 2'-O-methyl modified nucleotide
taggcatcatgccaagggcac

SEQ ID NO: 903 - RNA, 21 nt, synthetic construct
  source 1..21: mol_type = other RNA
  modified_base 1: mod_base = OTHER; note = 2'-O-methyl modified nucleotide with phosphorothioate linkage
  modified_base 2: mod_base = OTHER; note = 2'-fluoro modified nucleotide with phosphorothioate linkage
  modified_base 3: mod_base = OTHER; note = 2'-O-methyl modified nucleotide
  modified_base 4: mod_base = OTHER; note = 2'-O-methyl modified nucleotide
  modified_base 5: mod_base = OTHER; note = 2'-O-methyl modified nucleotide
  modified_base 6: mod_base = OTHER; note = 2'-fluoro modified nucleotide
  modified_base 7: mod_base = OTHER; note = 2'-O-methyl modified nucleotide
  modified_base 8: mod_base = OTHER; note = 2'-O-methyl modified nucleotide
  modified_base 9: mod_base = OTHER; note = 2'-O-methyl modified nucleotide
  modified_base 10: mod_base = OTHER; note = 2'-O-methyl modified nucleotide
  modified_base 11: mod_base = OTHER; note = 2'-O-methyl modified nucleotide
  modified_base 12: mod_base = OTHER; note = 2'-O-methyl modified nucleotide
  modified_base 13: mod_base = OTHER; note = 2'-O-methyl modified nucleotide
  modified_base 14: mod_base = OTHER; note = 2'-fluoro modified nucleotide
  modified_base 15: mod_base = OTHER; note = 2'-O-methyl modified nucleotide
  modified_base 16: mod_base = OTHER; note = 2'-fluoro modified nucleotide
  modified_base 17: mod_base = OTHER; note = 2'-O-methyl modified nucleotide
  modified_base 18: mod_base = OTHER; note = 2'-O-methyl modified nucleotide
  modified_base 19: mod_base = OTHER; note = 2'-O-methyl modified nucleotide with phosphorothioate linkage
  modified_base 20: mod_base = OTHER; note = 2'-O-methyl modified nucleotide with phosphorothioate linkage
  modified_base 21: mod_base = OTHER; note = 2'-O-methyl modified nucleotide
tcagcccagcgagagcatgat

SEQ ID NO: 904 - RNA, 21 nt, synthetic construct
  source 1..21: mol_type = other RNA
  modified_base 1: mod_base = OTHER; note = 2'-O-methyl modified nucleotide with phosphorothioate linkage
  modified_base 2: mod_base = OTHER; note = 2'-fluoro modified nucleotide with phosphorothioate linkage
  modified_base 3: mod_base = OTHER; note = 2'-O-methyl modified nucleotide
  modified_base 4: mod_base = OTHER; note = 2'-O-methyl modified nucleotide
  modified_base 5: mod_base = OTHER; note = 2'-O-methyl modified nucleotide
  modified_base 6: mod_base = OTHER; note = 2'-fluoro modified nucleotide
  modified_base 7: mod_base = OTHER; note = 2'-O-methyl modified nucleotide
  modified_base 8: mod_base = OTHER; note = 2'-O-methyl modified nucleotide
  modified_base 9: mod_base = OTHER; note = 2'-O-methyl modified nucleotide
  modified_base 10: mod_base = OTHER; note = 2'-O-methyl modified nucleotide
  modified_base 11: mod_base = OTHER; note = 2'-O-methyl modified nucleotide
  modified_base 12: mod_base = OTHER; note = 2'-O-methyl modified nucleotide
  modified_base 13: mod_base = OTHER; note = 2'-O-methyl modified nucleotide
  modified_base 14: mod_base = OTHER; note = 2'-fluoro modified nucleotide
  modified_base 15: mod_base = OTHER; note = 2'-O-methyl modified nucleotide
  modified_base 16: mod_base = OTHER; note = 2'-fluoro modified nucleotide
  modified_base 17: mod_base = OTHER; note = 2'-O-methyl modified nucleotide
  modified_base 18: mod_base = OTHER; note = 2'-O-methyl modified nucleotide
  modified_base 19: mod_base = OTHER; note = 2'-O-methyl modified nucleotide with phosphorothioate linkage
  modified_base 20: mod_base = OTHER; note = 2'-O-methyl modified nucleotide with phosphorothioate linkage
  modified_base 21: mod_base = OTHER; note = 2'-O-methyl modified nucleotide
ttttgaggacgatccctatgg

SEQ ID NO: 905 - RNA, 21 nt, synthetic construct
  source 1..21: mol_type = other RNA
  modified_base 1: mod_base = OTHER; note = 2'-O-methyl modified nucleotide with phosphorothioate linkage
  modified_base 2: mod_base = OTHER; note = 2'-fluoro modified nucleotide with phosphorothioate linkage
  modified_base 3: mod_base = OTHER; note = 2'-O-methyl modified nucleotide
  modified_base 4: mod_base = OTHER; note = 2'-O-methyl modified nucleotide
  modified_base 5: mod_base = OTHER; note = 2'-O-methyl modified nucleotide
  modified_base 6: mod_base = OTHER; note = 2'-fluoro modified nucleotide
  modified_base 7: mod_base = OTHER; note = 2'-O-methyl modified nucleotide
  modified_base 8: mod_base = OTHER; note = 2'-O-methyl modified nucleotide
  modified_base 9: mod_base = OTHER; note = 2'-O-methyl modified nucleotide
  modified_base 10: mod_base = OTHER; note = 2'-O-methyl modified nucleotide
  modified_base 11: mod_base = OTHER; note = 2'-O-methyl modified nucleotide
  modified_base 12: mod_base = OTHER; note = 2'-O-methyl modified nucleotide
  modified_base 13: mod_base = OTHER; note = 2'-O-methyl modified nucleotide
  modified_base 14: mod_base = OTHER; note = 2'-fluoro modified nucleotide
  modified_base 15: mod_base = OTHER; note = 2'-O-methyl modified nucleotide
  modified_base 16: mod_base = OTHER; note = 2'-fluoro modified nucleotide
  modified_base 17: mod_base = OTHER; note = 2'-O-methyl modified nucleotide
  modified_base 18: mod_base = OTHER; note = 2'-O-methyl modified nucleotide
  modified_base 19: mod_base = OTHER; note = 2'-O-methyl modified nucleotide with phosphorothioate linkage
  modified_base 20: mod_base = OTHER; note = 2'-O-methyl modified nucleotide with phosphorothioate linkage
  modified_base 21: mod_base = OTHER; note = 2'-O-methyl modified nucleotide
tgtgtcatggcaaacatgatg

SEQ ID NO: 906 - RNA, 21 nt, synthetic construct
  source 1..21: mol_type = other RNA
  modified_base 1: mod_base = OTHER; note = 2'-O-methyl modified nucleotide with phosphorothioate linkage
  modified_base 2: mod_base = OTHER; note = 2'-fluoro modified nucleotide with phosphorothioate linkage
  modified_base 3: mod_base = OTHER; note = 2'-O-methyl modified nucleotide
  modified_base 4: mod_base = OTHER; note = 2'-O-methyl modified nucleotide
  modified_base 5: mod_base = OTHER; note = 2'-O-methyl modified nucleotide
  modified_base 6: mod_base = OTHER; note = 2'-fluoro modified nucleotide
  modified_base 7: mod_base = OTHER; note = 2'-O-methyl modified nucleotide
  modified_base 8: mod_base = OTHER; note = 2'-O-methyl modified nucleotide
  modified_base 9: mod_base = OTHER; note = 2'-O-methyl modified nucleotide
  modified_base 10: mod_base = OTHER; note = 2'-O-methyl modified nucleotide
  modified_base 11: mod_base = OTHER; note = 2'-O-methyl modified nucleotide
  modified_base 12: mod_base = OTHER; note = 2'-O-methyl modified nucleotide
  modified_base 13: mod_base = OTHER; note = 2'-O-methyl modified nucleotide
  modified_base 14: mod_base = OTHER; note = 2'-fluoro modified nucleotide
  modified_base 15: mod_base = OTHER; note = 2'-O-methyl modified nucleotide
  modified_base 16: mod_base = OTHER; note = 2'-fluoro modified nucleotide
  modified_base 17: mod_base = OTHER; note = 2'-O-methyl modified nucleotide
  modified_base 18: mod_base = OTHER; note = 2'-O-methyl modified nucleotide
  modified_base 19: mod_base = OTHER; note = 2'-O-methyl modified nucleotide with phosphorothioate linkage
  modified_base 20: mod_base = OTHER; note = 2'-O-methyl modified nucleotide with phosphorothioate linkage
  modified_base 21: mod_base = OTHER; note = 2'-O-methyl modified nucleotide
tggcatgatgccatactgtgc

SEQ ID NO: 907 - RNA, 21 nt, synthetic construct
  source 1..21: mol_type = other RNA
  modified_base 1: mod_base = OTHER; note = 2'-O-methyl modified nucleotide with phosphorothioate linkage
  modified_base 2: mod_base = OTHER; note = 2'-fluoro modified nucleotide with phosphorothioate linkage
  modified_base 3: mod_base = OTHER; note = 2'-O-methyl modified nucleotide
  modified_base 4: mod_base = OTHER; note = 2'-O-methyl modified nucleotide
  modified_base 5: mod_base = OTHER; note = 2'-O-methyl modified nucleotide
  modified_base 6: mod_base = OTHER; note = 2'-fluoro modified nucleotide
  modified_base 7: mod_base = OTHER; note = 2'-O-methyl modified nucleotide
  modified_base 8: mod_base = OTHER; note = 2'-O-methyl modified nucleotide
  modified_base 9: mod_base = OTHER; note = 2'-O-methyl modified nucleotide
  modified_base 10: mod_base = OTHER; note = 2'-O-methyl modified nucleotide
  modified_base 11: mod_base = OTHER; note = 2'-O-methyl modified nucleotide
  modified_base 12: mod_base = OTHER; note = 2'-O-methyl modified nucleotide
  modified_base 13: mod_base = OTHER; note = 2'-O-methyl modified nucleotide
  modified_base 14: mod_base = OTHER; note = 2'-fluoro modified nucleotide
  modified_base 15: mod_base = OTHER; note = 2'-O-methyl modified nucleotide
  modified_base 16: mod_base = OTHER; note = 2'-fluoro modified nucleotide
  modified_base 17: mod_base = OTHER; note = 2'-O-methyl modified nucleotide
  modified_base 18: mod_base = OTHER; note = 2'-O-methyl modified nucleotide
  modified_base 19: mod_base = OTHER; note = 2'-O-methyl modified nucleotide with phosphorothioate linkage
  modified_base 20: mod_base = OTHER; note = 2'-O-methyl modified nucleotide with phosphorothioate linkage
  modified_base 21: mod_base = OTHER; note = 2'-O-methyl modified nucleotide
tagttcaggaattgagtgact

SEQ ID NO: 908 - RNA, 21 nt, synthetic construct
  source 1..21: mol_type = other RNA
  modified_base 1: mod_base = OTHER; note = 2'-O-methyl modified nucleotide with phosphorothioate linkage
  modified_base 2: mod_base = OTHER; note = 2'-fluoro modified nucleotide with phosphorothioate linkage
  modified_base 3: mod_base = OTHER; note = 2'-O-methyl modified nucleotide
  modified_base 4: mod_base = OTHER; note = 2'-O-methyl modified nucleotide
  modified_base 5: mod_base = OTHER; note = 2'-O-methyl modified nucleotide
  modified_base 6: mod_base = OTHER; note = 2'-fluoro modified nucleotide
  modified_base 7: mod_base = OTHER; note = 2'-O-methyl modified nucleotide
  modified_base 8: mod_base = OTHER; note = 2'-O-methyl modified nucleotide
  modified_base 9: mod_base = OTHER; note = 2'-O-methyl modified nucleotide
  modified_base 10: mod_base = OTHER; note = 2'-O-methyl modified nucleotide
  modified_base 11: mod_base = OTHER; note = 2'-O-methyl modified nucleotide
  modified_base 12: mod_base = OTHER; note = 2'-O-methyl modified nucleotide
  modified_base 13: mod_base = OTHER; note = 2'-O-methyl modified nucleotide
  modified_base 14: mod_base = OTHER; note = 2'-fluoro modified nucleotide
  modified_base 15: mod_base = OTHER; note = 2'-O-methyl modified nucleotide
  modified_base 16: mod_base = OTHER; note = 2'-fluoro modified nucleotide
  modified_base 17: mod_base = OTHER; note = 2'-O-methyl modified nucleotide
  modified_base 18: mod_base = OTHER; note = 2'-O-methyl modified nucleotide
  modified_base 19: mod_base = OTHER; note = 2'-O-methyl modified nucleotide with phosphorothioate linkage
  modified_base 20: mod_base = OTHER; note = 2'-O-methyl modified nucleotide with phosphorothioate linkage
  modified_base 21: mod_base = OTHER; note = 2'-O-methyl modified nucleotide
tgccgtttggatttgaggacg

SEQ ID NO: 909 - RNA, 21 nt, synthetic construct
  source 1..21: mol_type = other RNA
  modified_base 1: mod_base = OTHER; note = 2'-O-methyl modified nucleotide with phosphorothioate linkage
  modified_base 2: mod_base = OTHER; note = 2'-fluoro modified nucleotide with phosphorothioate linkage
  modified_base 3: mod_base = OTHER; note = 2'-O-methyl modified nucleotide
  modified_base 4: mod_base = OTHER; note = 2'-O-methyl modified nucleotide
  modified_base 5: mod_base = OTHER; note = 2'-O-methyl modified nucleotide
  modified_base 6: mod_base = OTHER; note = 2'-fluoro modified nucleotide
  modified_base 7: mod_base = OTHER; note = 2'-O-methyl modified nucleotide
  modified_base 8: mod_base = OTHER; note = 2'-O-methyl modified nucleotide
  modified_base 9: mod_base = OTHER; note = 2'-O-methyl modified nucleotide
  modified_base 10: mod_base = OTHER; note = 2'-O-methyl modified nucleotide
  modified_base 11: mod_base = OTHER; note = 2'-O-methyl modified nucleotide
  modified_base 12: mod_base = OTHER; note = 2'-O-methyl modified nucleotide
  modified_base 13: mod_base = OTHER; note = 2'-O-methyl modified nucleotide
  modified_base 14: mod_base = OTHER; note = 2'-fluoro modified nucleotide
  modified_base 15: mod_base = OTHER; note = 2'-O-methyl modified nucleotide
  modified_base 16: mod_base = OTHER; note = 2'-fluoro modified nucleotide
  modified_base 17: mod_base = OTHER; note = 2'-O-methyl modified nucleotide
  modified_base 18: mod_base = OTHER; note = 2'-O-methyl modified nucleotide
  modified_base 19: mod_base = OTHER; note = 2'-O-methyl modified nucleotide with phosphorothioate linkage
  modified_base 20: mod_base = OTHER; note = 2'-O-methyl modified nucleotide with phosphorothioate linkage
  modified_base 21: mod_base = OTHER; note = 2'-O-methyl modified nucleotide
tagcgcatgtattgtggccgt

SEQ ID NO: 910 - RNA, 21 nt, synthetic construct
  source 1..21: mol_type = other RNA
  modified_base 1: mod_base = OTHER; note = 2'-O-methyl modified nucleotide with phosphorothioate linkage
  modified_base 2: mod_base = OTHER; note = 2'-fluoro modified nucleotide with phosphorothioate linkage
  modified_base 3: mod_base = OTHER; note = 2'-O-methyl modified nucleotide
  modified_base 4: mod_base = OTHER; note = 2'-O-methyl modified nucleotide
  modified_base 5: mod_base = OTHER; note = 2'-O-methyl modified nucleotide
  modified_base 6: mod_base = OTHER; note = 2'-fluoro modified nucleotide
  modified_base 7: mod_base = OTHER; note = 2'-O-methyl modified nucleotide
  modified_base 8: mod_base = OTHER; note = 2'-O-methyl modified nucleotide
  modified_base 9: mod_base = OTHER; note = 2'-O-methyl modified nucleotide
  modified_base 10: mod_base = OTHER; note = 2'-O-methyl modified nucleotide
  modified_base 11: mod_base = OTHER; note = 2'-O-methyl modified nucleotide
  modified_base 12: mod_base = OTHER; note = 2'-O-methyl modified nucleotide
  modified_base 13: mod_base = OTHER; note = 2'-O-methyl modified nucleotide
  modified_base 14: mod_base = OTHER; note = 2'-fluoro modified nucleotide
  modified_base 15: mod_base = OTHER; note = 2'-O-methyl modified nucleotide
  modified_base 16: mod_base = OTHER; note = 2'-fluoro modified nucleotide
  modified_base 17: mod_base = OTHER; note = 2'-O-methyl modified nucleotide
  modified_base 18: mod_base = OTHER; note = 2'-O-methyl modified nucleotide
  modified_base 19: mod_base = OTHER; note = 2'-O-methyl modified nucleotide with phosphorothioate linkage
  modified_base 20: mod_base = OTHER; note = 2'-O-methyl modified nucleotide with phosphorothioate linkage
  modified_base 21: mod_base = OTHER; note = 2'-O-methyl modified nucleotide
tctgtgacggccacactgcac

SEQ ID NO: 911 - RNA, 21 nt, synthetic construct
  source 1..21: mol_type = other RNA
  modified_base 1: mod_base = OTHER; note = 2'-O-methyl modified nucleotide with phosphorothioate linkage
  modified_base 2: mod_base = OTHER; note = 2'-fluoro modified nucleotide with phosphorothioate linkage
  modified_base 3: mod_base = OTHER; note = 2'-O-methyl modified nucleotide
  modified_base 4: mod_base = OTHER; note = 2'-O-methyl modified nucleotide
  modified_base 5: mod_base = OTHER; note = 2'-O-methyl modified nucleotide
  modified_base 6: mod_base = OTHER; note = 2'-fluoro modified nucleotide
  modified_base 7: mod_base = OTHER; note = 2'-O-methyl modified nucleotide
  modified_base 8: mod_base = OTHER; note = 2'-O-methyl modified nucleotide
  modified_base 9: mod_base = OTHER; note = 2'-O-methyl modified nucleotide
  modified_base 10: mod_base = OTHER; note = 2'-O-methyl modified nucleotide
  modified_base 11: mod_base = OTHER; note = 2'-O-methyl modified nucleotide
  modified_base 12: mod_base = OTHER; note = 2'-O-methyl modified nucleotide
  modified_base 13: mod_base = OTHER; note = 2'-O-methyl modified nucleotide
  modified_base 14: mod_base = OTHER; note = 2'-fluoro modified nucleotide
  modified_base 15: mod_base = OTHER; note = 2'-O-methyl modified nucleotide
  modified_base 16: mod_base = OTHER; note = 2'-fluoro modified nucleotide
  modified_base 17: mod_base = OTHER; note = 2'-O-methyl modified nucleotide
  modified_base 18: mod_base = OTHER; note = 2'-O-methyl modified nucleotide
  modified_base 19: mod_base = OTHER; note = 2'-O-methyl modified nucleotide with phosphorothioate linkage
  modified_base 20: mod_base = OTHER; note = 2'-O-methyl modified nucleotide with phosphorothioate linkage
  modified_base 21: mod_base = OTHER; note = 2'-O-methyl modified nucleotide
tgatccctatggtgcaaggaa

SEQ ID NO: 912 - RNA, 21 nt, synthetic construct
  source 1..21: mol_type = other RNA
  modified_base 1: mod_base = OTHER; note = 2'-O-methyl modified nucleotide with phosphorothioate linkage
  modified_base 2: mod_base = OTHER; note = 2'-fluoro modified nucleotide with phosphorothioate linkage
  modified_base 3: mod_base = OTHER; note = 2'-O-methyl modified nucleotide
  modified_base 4: mod_base = OTHER; note = 2'-O-methyl modified nucleotide
  modified_base 5: mod_base = OTHER; note = 2'-O-methyl modified nucleotide
  modified_base 6: mod_base = OTHER; note = 2'-fluoro modified nucleotide
  modified_base 7: mod_base = OTHER; note = 2'-O-methyl modified nucleotide
  modified_base 8: mod_base = OTHER; note = 2'-O-methyl modified nucleotide
  modified_base 9: mod_base = OTHER; note = 2'-O-methyl modified nucleotide
  modified_base 10: mod_base = OTHER; note = 2'-O-methyl modified nucleotide
  modified_base 11: mod_base = OTHER; note = 2'-O-methyl modified nucleotide
  modified_base 12: mod_base = OTHER; note = 2'-O-methyl modified nucleotide
  modified_base 13: mod_base = OTHER; note = 2'-O-methyl modified nucleotide
  modified_base 14: mod_base = OTHER; note = 2'-fluoro modified nucleotide
  modified_base 15: mod_base = OTHER; note = 2'-O-methyl modified nucleotide
  modified_base 16: mod_base = OTHER; note = 2'-fluoro modified nucleotide
  modified_base 17: mod_base = OTHER; note = 2'-O-methyl modified nucleotide
  modified_base 18: mod_base = OTHER; note = 2'-O-methyl modified nucleotide
  modified_base 19: mod_base = OTHER; note = 2'-O-methyl modified nucleotide with phosphorothioate linkage
  modified_base 20: mod_base = OTHER; note = 2'-O-methyl modified nucleotide with phosphorothioate linkage
  modified_base 21: mod_base = OTHER; note = 2'-O-methyl modified nucleotide
tctttatagggcaccttgtcc

SEQ ID NO: 913 - RNA, 21 nt, synthetic construct
  source 1..21: mol_type = other RNA
  modified_base 1: mod_base = OTHER; note = 2'-O-methyl modified nucleotide with phosphorothioate linkage
  modified_base 2: mod_base = OTHER; note = 2'-fluoro modified nucleotide with phosphorothioate linkage
  modified_base 3: mod_base = OTHER; note = 2'-O-methyl modified nucleotide
  modified_base 4: mod_base = OTHER; note = 2'-O-methyl modified nucleotide
  modified_base 5: mod_base = OTHER; note = 2'-O-methyl modified nucleotide
  modified_base 6: mod_base = OTHER; note = 2'-fluoro modified nucleotide
  modified_base 7: mod_base = OTHER; note = 2'-O-methyl modified nucleotide
  modified_base 8: mod_base = OTHER; note = 2'-O-methyl modified nucleotide
  modified_base 9: mod_base = OTHER; note = 2'-O-methyl modified nucleotide
  modified_base 10: mod_base = OTHER; note = 2'-O-methyl modified nucleotide
  modified_base 11: mod_base = OTHER; note = 2'-O-methyl modified nucleotide
  modified_base 12: mod_base = OTHER; note = 2'-O-methyl modified nucleotide
  modified_base 13: mod_base = OTHER; note = 2'-O-methyl modified nucleotide
  modified_base 14: mod_base = OTHER; note = 2'-fluoro modified nucleotide
  modified_base 15: mod_base = OTHER; note = 2'-O-methyl modified nucleotide
  modified_base 16: mod_base = OTHER; note = 2'-fluoro modified nucleotide
  modified_base 17: mod_base = OTHER; note = 2'-O-methyl modified nucleotide
  modified_base 18: mod_base = OTHER; note = 2'-O-methyl modified nucleotide
  modified_base 19: mod_base = OTHER; note = 2'-O-methyl modified nucleotide with phosphorothioate linkage
  modified_base 20: mod_base = OTHER; note = 2'-O-methyl modified nucleotide with phosphorothioate linkage
  modified_base 21: mod_base = OTHER; note = 2'-O-methyl modified nucleotide
tcctatggtgcaaggaatgag

SEQ ID NO: 914 - RNA, 21 nt, synthetic construct
  source 1..21: mol_type = other RNA
  modified_base 1: mod_base = OTHER; note = 2'-O-methyl modified nucleotide with phosphorothioate linkage
  modified_base 2: mod_base = OTHER; note = 2'-fluoro modified nucleotide with phosphorothioate linkage
  modified_base 3: mod_base = OTHER; note = 2'-O-methyl modified nucleotide
  modified_base 4: mod_base = OTHER; note = 2'-O-methyl modified nucleotide
  modified_base 5: mod_base = OTHER; note = 2'-O-methyl modified nucleotide
  modified_base 6: mod_base = OTHER; note = 2'-fluoro modified nucleotide
  modified_base 7: mod_base = OTHER; note = 2'-O-methyl modified nucleotide
  modified_base 8: mod_base = OTHER; note = 2'-O-methyl modified nucleotide
  modified_base 9: mod_base = OTHER; note = 2'-O-methyl modified nucleotide
  modified_base 10: mod_base = OTHER; note = 2'-O-methyl modified nucleotide
  modified_base 11: mod_base = OTHER; note = 2'-O-methyl modified nucleotide
  modified_base 12: mod_base = OTHER; note = 2'-O-methyl modified nucleotide
  modified_base 13: mod_base = OTHER; note = 2'-O-methyl modified nucleotide
  modified_base 14: mod_base = OTHER; note = 2'-fluoro modified nucleotide
  modified_base 15: mod_base = OTHER; note = 2'-O-methyl modified nucleotide
  modified_base 16: mod_base = OTHER; note = 2'-fluoro modified nucleotide
  modified_base 17: mod_base = OTHER; note = 2'-O-methyl modified nucleotide
  modified_base 18: mod_base = OTHER; note = 2'-O-methyl modified nucleotide
  modified_base 19: mod_base = OTHER; note = 2'-O-methyl modified nucleotide with phosphorothioate linkage
  modified_base 20: mod_base = OTHER; note = 2'-O-methyl modified nucleotide with phosphorothioate linkage
  modified_base 21: mod_base = OTHER; note = 2'-O-methyl modified nucleotide
tcataagtgagccttgatctt

SEQ ID NO: 915 - RNA, 21 nt, synthetic construct
  source 1..21: mol_type = other RNA
  modified_base 1: mod_base = OTHER; note = 2'-O-methyl modified nucleotide with phosphorothioate linkage
  modified_base 2: mod_base = OTHER; note = 2'-fluoro modified nucleotide with phosphorothioate linkage
  modified_base 3: mod_base = OTHER; note = 2'-O-methyl modified nucleotide
  modified_base 4: mod_base = OTHER; note = 2'-O-methyl modified nucleotide
  modified_base 5: mod_base = OTHER; note = 2'-O-methyl modified nucleotide
  modified_base 6: mod_base = OTHER; note = 2'-fluoro modified nucleotide
  modified_base 7: mod_base = OTHER; note = 2'-O-methyl modified nucleotide
  modified_base 8: mod_base = OTHER; note = 2'-O-methyl modified nucleotide
  modified_base 9: mod_base = OTHER; note = 2'-O-methyl modified nucleotide
  modified_base 10: mod_base = OTHER; note = 2'-O-methyl modified nucleotide
  modified_base 11: mod_base = OTHER; note = 2'-O-methyl modified nucleotide
  modified_base 12: mod_base = OTHER; note = 2'-O-methyl modified nucleotide
  modified_base 13: mod_base = OTHER; note = 2'-O-methyl modified nucleotide
  modified_base 14: mod_base = OTHER; note = 2'-fluoro modified nucleotide
  modified_base 15: mod_base = OTHER; note = 2'-O-methyl modified nucleotide
  modified_base 16: mod_base = OTHER; note = 2'-fluoro modified nucleotide
  modified_base 17: mod_base = OTHER; note = 2'-O-methyl modified nucleotide
  modified_base 18: mod_base = OTHER; note = 2'-O-methyl modified nucleotide
  modified_base 19: mod_base = OTHER; note = 2'-O-methyl modified nucleotide with phosphorothioate linkage
  modified_base 20: mod_base = OTHER; note = 2'-O-methyl modified nucleotide with phosphorothioate linkage
  modified_base 21: mod_base = OTHER; note = 2'-O-methyl modified nucleotide
tatcctcctgtgaggcagtgg

SEQ ID NO: 916 - RNA, 21 nt, synthetic construct
  source 1..21: mol_type = other RNA
  modified_base 1: mod_base = OTHER; note = 2'-O-methyl modified nucleotide with phosphorothioate linkage
  modified_base 2: mod_base = OTHER; note = 2'-fluoro modified nucleotide with phosphorothioate linkage
  modified_base 3: mod_base = OTHER; note = 2'-O-methyl modified nucleotide
  modified_base 4: mod_base = OTHER; note = 2'-O-methyl modified nucleotide
  modified_base 5: mod_base = OTHER; note = 2'-O-methyl modified nucleotide
  modified_base 6: mod_base = OTHER; note = 2'-fluoro modified nucleotide
  modified_base 7: mod_base = OTHER; note = 2'-O-methyl modified nucleotide
  modified_base 8: mod_base = OTHER; note = 2'-O-methyl modified nucleotide
  modified_base 9: mod_base = OTHER; note = 2'-O-methyl modified nucleotide
  modified_base 10: mod_base = OTHER; note = 2'-O-methyl modified nucleotide
  modified_base 11: mod_base = OTHER; note = 2'-O-methyl modified nucleotide
  modified_base 12: mod_base = OTHER; note = 2'-O-methyl modified nucleotide
  modified_base 13: mod_base = OTHER; note = 2'-O-methyl modified nucleotide
  modified_base 14: mod_base = OTHER; note = 2'-fluoro modified nucleotide
  modified_base 15: mod_base = OTHER; note = 2'-O-methyl modified nucleotide
  modified_base 16: mod_base = OTHER; note = 2'-fluoro modified nucleotide
  modified_base 17: mod_base = OTHER; note = 2'-O-methyl modified nucleotide
  modified_base 18: mod_base = OTHER; note = 2'-O-methyl modified nucleotide
  modified_base 19: mod_base = OTHER; note = 2'-O-methyl modified nucleotide with phosphorothioate linkage
  modified_base 20: mod_base = OTHER; note = 2'-O-methyl modified nucleotide with phosphorothioate linkage
  modified_base 21: mod_base = OTHER; note = 2'-O-methyl modified nucleotide
tcgcttgccaaagttgggtgg

SEQ ID NO: 917 - RNA, 21 nt, synthetic construct
  source 1..21: mol_type = other RNA
  modified_base 1: mod_base = OTHER; note = 2'-O-methyl modified nucleotide with phosphorothioate linkage
  modified_base 2: mod_base = OTHER; note = 2'-fluoro modified nucleotide with phosphorothioate linkage
  modified_base 3: mod_base = OTHER; note = 2'-O-methyl modified nucleotide
  modified_base 4: mod_base = OTHER; note = 2'-O-methyl modified nucleotide
  modified_base 5: mod_base = OTHER; note = 2'-O-methyl modified nucleotide
  modified_base 6: mod_base = OTHER; note = 2'-fluoro modified nucleotide
  modified_base 7: mod_base = OTHER; note = 2'-O-methyl modified nucleotide
  modified_base 8: mod_base = OTHER; note = 2'-O-methyl modified nucleotide
  modified_base 9: mod_base = OTHER; note = 2'-O-methyl modified nucleotide
  modified_base 10: mod_base = OTHER; note = 2'-O-methyl modified nucleotide
  modified_base 11: mod_base = OTHER; note = 2'-O-methyl modified nucleotide
  modified_base 12: mod_base = OTHER; note = 2'-O-methyl modified nucleotide
  modified_base 13: mod_base = OTHER; note = 2'-O-methyl modified nucleotide
  modified_base 14: mod_base = OTHER; note = 2'-fluoro modified nucleotide
  modified_base 15: mod_base = OTHER; note = 2'-O-methyl modified nucleotide
  modified_base 16: mod_base = OTHER; note = 2'-fluoro modified nucleotide
  modified_base 17: mod_base = OTHER; note = 2'-O-methyl modified nucleotide
  modified_base 18: mod_base = OTHER; note = 2'-O-methyl modified nucleotide
  modified_base 19: mod_base = OTHER; note = 2'-O-methyl modified nucleotide with phosphorothioate linkage
  modified_base 20: mod_base = OTHER; note = 2'-O-methyl modified nucleotide with phosphorothioate linkage
  modified_base 21: mod_base = OTHER; note = 2'-O-methyl modified nucleotide
tggcttccataagtgagcctt

SEQ ID NO: 918 - RNA, 21 nt, synthetic construct
  source 1..21: mol_type = other RNA
  modified_base 1: mod_base = OTHER; note = 2'-O-methyl modified nucleotide with phosphorothioate linkage
  modified_base 2: mod_base = OTHER; note = 2'-fluoro modified nucleotide with phosphorothioate linkage
  modified_base 3: mod_base = OTHER; note = 2'-O-methyl modified nucleotide
  modified_base 4: mod_base = OTHER; note = 2'-O-methyl modified nucleotide
  modified_base 5: mod_base = OTHER; note = 2'-O-methyl modified nucleotide
  modified_base 6: mod_base = OTHER; note = 2'-fluoro modified nucleotide
  modified_base 7: mod_base = OTHER; note = 2'-O-methyl modified nucleotide
  modified_base 8: mod_base = OTHER; note = 2'-O-methyl modified nucleotide
  modified_base 9: mod_base = OTHER; note = 2'-O-methyl modified nucleotide
  modified_base 10: mod_base = OTHER; note = 2'-O-methyl modified nucleotide
  modified_base 11: mod_base = OTHER; note = 2'-O-methyl modified nucleotide
  modified_base 12: mod_base = OTHER; note = 2'-O-methyl modified nucleotide
  modified_base 13: mod_base = OTHER; note = 2'-O-methyl modified nucleotide
  modified_base 14: mod_base = OTHER; note = 2'-fluoro modified nucleotide
  modified_base 15: mod_base = OTHER; note = 2'-O-methyl modified nucleotide
  modified_base 16: mod_base = OTHER; note = 2'-fluoro modified nucleotide
  modified_base 17: mod_base = OTHER; note = 2'-O-methyl modified nucleotide
  modified_base 18: mod_base = OTHER; note = 2'-O-methyl modified nucleotide
  modified_base 19: mod_base = OTHER; note = 2'-O-methyl modified nucleotide with phosphorothioate linkage
  modified_base 20: mod_base = OTHER; note = 2'-O-methyl modified nucleotide with phosphorothioate linkage
  modified_base 21: mod_base = OTHER; note = 2'-O-methyl modified nucleotide
tgagagaactgtgacggccac

SEQ ID NO: 919 - RNA, 21 nt, synthetic construct
  source 1..21: mol_type = other RNA
  modified_base 1: mod_base = OTHER; note = 2'-O-methyl modified nucleotide with phosphorothioate linkage
  modified_base 2: mod_base = OTHER; note = 2'-fluoro modified nucleotide with phosphorothioate linkage
  modified_base 3: mod_base = OTHER; note = 2'-O-methyl modified nucleotide
  modified_base 4: mod_base = OTHER; note = 2'-O-methyl modified nucleotide
  modified_base 5: mod_base = OTHER; note = 2'-O-methyl modified nucleotide
  modified_base 6: mod_base = OTHER; note = 2'-fluoro modified nucleotide
  modified_base 7: mod_base = OTHER; note = 2'-O-methyl modified nucleotide
  modified_base 8: mod_base = OTHER; note = 2'-O-methyl modified nucleotide
  modified_base 9: mod_base = OTHER; note = 2'-O-methyl modified nucleotide
  modified_base 10: mod_base = OTHER; note = 2'-O-methyl modified nucleotide
  modified_base 11: mod_base = OTHER; note = 2'-O-methyl modified nucleotide
  modified_base 12: mod_base = OTHER; note = 2'-O-methyl modified nucleotide
  modified_base 13: mod_base = OTHER; note = 2'-O-methyl modified nucleotide
  modified_base 14: mod_base = OTHER; note = 2'-fluoro modified nucleotide
  modified_base 15: mod_base = OTHER; note = 2'-O-methyl modified nucleotide
  modified_base 16: mod_base = OTHER; note = 2'-fluoro modified nucleotide
  modified_base 17: mod_base = OTHER; note = 2'-O-methyl modified nucleotide
  modified_base 18: mod_base = OTHER; note = 2'-O-methyl modified nucleotide
  modified_base 19: mod_base = OTHER; note = 2'-O-methyl modified nucleotide with phosphorothioate linkage
  modified_base 20: mod_base = OTHER; note = 2'-O-methyl modified nucleotide with phosphorothioate linkage
  modified_base 21: mod_base = OTHER; note = 2'-O-methyl modified nucleotide
taatgggatttgggtatttga

SEQ ID NO: 920 - RNA, 21 nt, synthetic construct
  source 1..21: mol_type = other RNA
  modified_base 1: mod_base = OTHER; note = 2'-O-methyl modified nucleotide with phosphorothioate linkage
  modified_base 2: mod_base = OTHER; note = 2'-fluoro modified nucleotide with phosphorothioate linkage
  modified_base 3: mod_base = OTHER; note = 2'-O-methyl modified nucleotide
  modified_base 4: mod_base = OTHER; note = 2'-O-methyl modified nucleotide
  modified_base 5: mod_base = OTHER; note = 2'-O-methyl modified nucleotide
  modified_base 6: mod_base = OTHER; note = 2'-fluoro modified nucleotide
  modified_base 7: mod_base = OTHER; note = 2'-O-methyl modified nucleotide
  modified_base 8: mod_base = OTHER; note = 2'-O-methyl modified nucleotide
  modified_base 9: mod_base = OTHER; note = 2'-O-methyl modified nucleotide
  modified_base 10: mod_base = OTHER; note = 2'-O-methyl modified nucleotide
  modified_base 11: mod_base = OTHER; note = 2'-O-methyl modified nucleotide
  modified_base 12: mod_base = OTHER; note = 2'-O-methyl modified nucleotide
  modified_base 13: mod_base = OTHER; note = 2'-O-methyl modified nucleotide
  modified_base 14: mod_base = OTHER; note = 2'-fluoro modified nucleotide
  modified_base 15: mod_base = OTHER; note = 2'-O-methyl modified nucleotide
  modified_base 16: mod_base = OTHER; note = 2'-fluoro modified nucleotide
  modified_base 17: mod_base = OTHER; note = 2'-O-methyl modified nucleotide
  modified_base 18: mod_base = OTHER; note = 2'-O-methyl modified nucleotide
  modified_base 19: mod_base = OTHER; note = 2'-O-methyl modified nucleotide with phosphorothioate linkage
  modified_base 20: mod_base = OTHER; note = 2'-O-methyl modified nucleotide with phosphorothioate linkage
  modified_base 21: mod_base = OTHER; note = 2'-O-methyl modified nucleotide
tgtggtccaatgacttcaggt

SEQ ID NO: 921 - RNA, 21 nt, synthetic construct
  source 1..21: mol_type = other RNA
  modified_base 1: mod_base = OTHER; note = 2'-O-methyl modified nucleotide with phosphorothioate linkage
  modified_base 2: mod_base = OTHER; note = 2'-fluoro modified nucleotide with phosphorothioate linkage
  modified_base 3: mod_base = OTHER; note = 2'-O-methyl modified nucleotide
  modified_base 4: mod_base = OTHER; note = 2'-O-methyl modified nucleotide
  modified_base 5: mod_base = OTHER; note = 2'-O-methyl modified nucleotide
  modified_base 6: mod_base = OTHER; note = 2'-fluoro modified nucleotide
  modified_base 7: mod_base = OTHER; note = 2'-O-methyl modified nucleotide
  modified_base 8: mod_base = OTHER; note = 2'-O-methyl modified nucleotide
  modified_base 9: mod_base = OTHER; note = 2'-O-methyl modified nucleotide
  modified_base 10: mod_base = OTHER; note = 2'-O-methyl modified nucleotide
  modified_base 11: mod_base = OTHER; note = 2'-O-methyl modified nucleotide
  modified_base 12: mod_base = OTHER; note = 2'-O-methyl modified nucleotide
  modified_base 13: mod_base = OTHER; note = 2'-O-methyl modified nucleotide
  modified_base 14: mod_base = OTHER; note = 2'-fluoro modified nucleotide
  modified_base 15: mod_base = OTHER; note = 2'-O-methyl modified nucleotide
  modified_base 16: mod_base = OTHER; note = 2'-fluoro modified nucleotide
  modified_base 17: mod_base = OTHER; note = 2'-O-methyl modified nucleotide
  modified_base 18: mod_base = OTHER; note = 2'-O-methyl modified nucleotide
  modified_base 19: mod_base = OTHER; note = 2'-O-methyl modified nucleotide with phosphorothioate linkage
  modified_base 20: mod_base = OTHER; note = 2'-O-methyl modified nucleotide with phosphorothioate linkage
  modified_base 21: mod_base = OTHER; note = 2'-O-methyl modified nucleotide
tcgtttggatttgaggacgat

SEQ ID NO: 922 - RNA, 21 nt, synthetic construct
  source 1..21: mol_type = other RNA
  modified_base 1: mod_base = OTHER; note = 2'-O-methyl modified nucleotide with phosphorothioate linkage
  modified_base 2: mod_base = OTHER; note = 2'-fluoro modified nucleotide with phosphorothioate linkage
  modified_base 3: mod_base = OTHER; note = 2'-O-methyl modified nucleotide
  modified_base 4: mod_base = OTHER; note = 2'-O-methyl modified nucleotide
  modified_base 5: mod_base = OTHER; note = 2'-O-methyl modified nucleotide
  modified_base 6: mod_base = OTHER; note = 2'-fluoro modified nucleotide
  modified_base 7: mod_base = OTHER; note = 2'-O-methyl modified nucleotide
  modified_base 8: mod_base = OTHER; note = 2'-O-methyl modified nucleotide
  modified_base 9: mod_base = OTHER; note = 2'-O-methyl modified nucleotide
  modified_base 10: mod_base = OTHER; note = 2'-O-methyl modified nucleotide
  modified_base 11: mod_base = OTHER; note = 2'-O-methyl modified nucleotide
  modified_base 12: mod_base = OTHER; note = 2'-O-methyl modified nucleotide
  modified_base 13: mod_base = OTHER; note = 2'-O-methyl modified nucleotide
  modified_base 14: mod_base = OTHER; note = 2'-fluoro modified nucleotide
  modified_base 15: mod_base = OTHER; note = 2'-O-methyl modified nucleotide
  modified_base 16: mod_base = OTHER; note = 2'-fluoro modified nucleotide
  modified_base 17: mod_base = OTHER; note = 2'-O-methyl modified nucleotide
  modified_base 18: mod_base = OTHER; note = 2'-O-methyl modified nucleotide
  modified_base 19: mod_base = OTHER; note = 2'-O-methyl modified nucleotide with phosphorothioate linkage
  modified_base 20: mod_base = OTHER; note = 2'-O-methyl modified nucleotide with phosphorothioate linkage
  modified_base 21: mod_base = OTHER; note = 2'-O-methyl modified nucleotide
tggcgcttgccaaagttgggt

SEQ ID NO: 923 - RNA, 21 nt, synthetic construct
  source 1..21: mol_type = other RNA
  modified_base 1: mod_base = OTHER; note = 2'-O-methyl modified nucleotide with phosphorothioate linkage
  modified_base 2: mod_base = OTHER; note = 2'-fluoro modified nucleotide with phosphorothioate linkage
  modified_base 3: mod_base = OTHER; note = 2'-O-methyl modified nucleotide
  modified_base 4: mod_base = OTHER; note = 2'-O-methyl modified nucleotide
  modified_base 5: mod_base = OTHER; note = 2'-O-methyl modified nucleotide
  modified_base 6: mod_base = OTHER; note = 2'-fluoro modified nucleotide
  modified_base 7: mod_base = OTHER; note = 2'-O-methyl modified nucleotide
  modified_base 8: mod_base = OTHER; note = 2'-O-methyl modified nucleotide
  modified_base 9: mod_base = OTHER; note = 2'-O-methyl modified nucleotide
  modified_base 10: mod_base = OTHER; note = 2'-O-methyl modified nucleotide
  modified_base 11: mod_base = OTHER; note = 2'-O-methyl modified nucleotide
  modified_base 12: mod_base = OTHER; note = 2'-O-methyl modified nucleotide
  modified_base 13: mod_base = OTHER; note = 2'-O-methyl modified nucleotide
  modified_base 14: mod_base = OTHER; note = 2'-fluoro modified nucleotide
  modified_base 15: mod_base = OTHER; note = 2'-O-methyl modified nucleotide
  modified_base 16: mod_base = OTHER; note = 2'-fluoro modified nucleotide
  modified_base 17: mod_base = OTHER; note = 2'-O-methyl modified nucleotide
  modified_base 18: mod_base = OTHER; note = 2'-O-methyl modified nucleotide
  modified_base 19: mod_base = OTHER; note = 2'-O-methyl modified nucleotide with phosphorothioate linkage
  modified_base 20: mod_base = OTHER; note = 2'-O-methyl modified nucleotide with phosphorothioate linkage
  modified_base 21: mod_base = OTHER; note = 2'-O-methyl modified nucleotide
tttgatgacatagcgcatgta

SEQ ID NO: 924 - RNA, 21 nt, synthetic construct
  source 1..21: mol_type = other RNA
  modified_base 1: mod_base = OTHER; note = 2'-O-methyl modified nucleotide with phosphorothioate linkage
  modified_base 2: mod_base = OTHER; note = 2'-fluoro modified nucleotide with phosphorothioate linkage
  modified_base 3: mod_base = OTHER; note = 2'-O-methyl modified nucleotide
  modified_base 4: mod_base = OTHER; note = 2'-O-methyl modified nucleotide
  modified_base 5: mod_base = OTHER; note = 2'-O-methyl modified nucleotide
  modified_base 6: mod_base = OTHER; note = 2'-fluoro modified nucleotide
  modified_base 7: mod_base = OTHER; note = 2'-O-methyl modified nucleotide
  modified_base 8: mod_base = OTHER; note = 2'-O-methyl modified nucleotide
  modified_base 9: mod_base = OTHER; note = 2'-O-methyl modified nucleotide
  modified_base 10: mod_base = OTHER; note = 2'-O-methyl modified nucleotide
  modified_base 11: mod_base = OTHER; note = 2'-O-methyl modified nucleotide
  modified_base 12: mod_base = OTHER; note = 2'-O-methyl modified nucleotide
  modified_base 13: mod_base = OTHER; note = 2'-O-methyl modified nucleotide
  modified_base 14: mod_base = OTHER; note = 2'-fluoro modified nucleotide
  modified_base 15: mod_base = OTHER; note = 2'-O-methyl modified nucleotide
  modified_base 16: mod_base = OTHER; note = 2'-fluoro modified nucleotide
  modified_base 17: mod_base = OTHER; note = 2'-O-methyl modified nucleotide
  modified_base 18: mod_base = OTHER; note = 2'-O-methyl modified nucleotide
  modified_base 19: mod_base = OTHER; note = 2'-O-methyl modified nucleotide with phosphorothioate linkage
  modified_base 20: mod_base = OTHER; note = 2'-O-methyl modified nucleotide with phosphorothioate linkage
  modified_base 21: mod_base = OTHER; note = 2'-O-methyl modified nucleotide
tggtctgtggggcgcttgcca

SEQ ID NO: 925 - RNA, 21 nt, synthetic construct
  source 1..21: mol_type = other RNA
  modified_base 1: mod_base = OTHER; note = 2'-O-methyl modified nucleotide with phosphorothioate linkage
  modified_base 2: mod_base = OTHER; note = 2'-fluoro modified nucleotide with phosphorothioate linkage
  modified_base 3: mod_base = OTHER; note = 2'-O-methyl modified nucleotide
  modified_base 4: mod_base = OTHER; note = 2'-O-methyl modified nucleotide
  modified_base 5: mod_base = OTHER; note = 2'-O-methyl modified nucleotide
  modified_base 6: mod_base = OTHER; note = 2'-fluoro modified nucleotide
  modified_base 7: mod_base = OTHER; note = 2'-O-methyl modified nucleotide
  modified_base 8: mod_base = OTHER; note = 2'-O-methyl modified nucleotide
  modified_base 9: mod_base = OTHER; note = 2'-O-methyl modified nucleotide
  modified_base 10: mod_base = OTHER; note = 2'-O-methyl modified nucleotide
  modified_base 11: mod_base = OTHER; note = 2'-O-methyl modified nucleotide
  modified_base 12: mod_base = OTHER; note = 2'-O-methyl modified nucleotide
  modified_base 13: mod_base = OTHER; note = 2'-O-methyl modified nucleotide
  modified_base 14: mod_base = OTHER; note = 2'-fluoro modified nucleotide
  modified_base 15: mod_base = OTHER; note = 2'-O-methyl modified nucleotide
  modified_base 16: mod_base = OTHER; note = 2'-fluoro modified nucleotide
  modified_base 17: mod_base = OTHER; note = 2'-O-methyl modified nucleotide
  modified_base 18: mod_base = OTHER; note = 2'-O-methyl modified nucleotide
  modified_base 19: mod_base = OTHER; note = 2'-O-methyl modified nucleotide with phosphorothioate linkage
  modified_base 20: mod_base = OTHER; note = 2'-O-methyl modified nucleotide with phosphorothioate linkage
  modified_base 21: mod_base = OTHER; note = 2'-O-methyl modified nucleotide
tactgaagacattggacaggt

SEQ ID NO: 926 - RNA, 21 nt, synthetic construct
  source 1..21: mol_type = other RNA
  modified_base 1: mod_base = OTHER; note = 2'-O-methyl modified nucleotide with phosphorothioate linkage
  modified_base 2: mod_base = OTHER; note = 2'-fluoro modified nucleotide with phosphorothioate linkage
  modified_base 3: mod_base = OTHER; note = 2'-O-methyl modified nucleotide
  modified_base 4: mod_base = OTHER; note = 2'-O-methyl modified nucleotide
  modified_base 5: mod_base = OTHER; note = 2'-O-methyl modified nucleotide
  modified_base 6: mod_base = OTHER; note = 2'-fluoro modified nucleotide
  modified_base 7: mod_base = OTHER; note = 2'-O-methyl modified nucleotide
  modified_base 8: mod_base = OTHER; note = 2'-O-methyl modified nucleotide
  modified_base 9: mod_base = OTHER; note = 2'-O-methyl modified nucleotide
  modified_base 10: mod_base = OTHER; note = 2'-O-methyl modified nucleotide
  modified_base 11: mod_base = OTHER; note = 2'-O-methyl modified nucleotide
  modified_base 12: mod_base = OTHER; note = 2'-O-methyl modified nucleotide
  modified_base 13: mod_base = OTHER; note = 2'-O-methyl modified nucleotide
  modified_base 14: mod_base = OTHER; note = 2'-fluoro modified nucleotide
  modified_base 15: mod_base = OTHER; note = 2'-O-methyl modified nucleotide
  modified_base 16: mod_base = OTHER; note = 2'-fluoro modified nucleotide
  modified_base 17: mod_base = OTHER; note = 2'-O-methyl modified nucleotide
  modified_base 18: mod_base = OTHER; note = 2'-O-methyl modified nucleotide
  modified_base 19: mod_base = OTHER; note = 2'-O-methyl modified nucleotide with phosphorothioate linkage
  modified_base 20: mod_base = OTHER; note = 2'-O-methyl modified nucleotide with phosphorothioate linkage
  modified_base 21: mod_base = OTHER; note = 2'-O-methyl modified nucleotide
tgactccgtttcttgtgcagt

SEQ ID NO: 927 - RNA, 21 nt, synthetic construct
  source 1..21: mol_type = other RNA
  modified_base 1: mod_base = OTHER; note = 2'-O-methyl modified nucleotide with phosphorothioate linkage
  modified_base 2: mod_base = OTHER; note = 2'-fluoro modified nucleotide with phosphorothioate linkage
  modified_base 3: mod_base = OTHER; note = 2'-O-methyl modified nucleotide
  modified_base 4: mod_base = OTHER; note = 2'-O-methyl modified nucleotide
  modified_base 5: mod_base = OTHER; note = 2'-O-methyl modified nucleotide
  modified_base 6: mod_base = OTHER; note = 2'-fluoro modified nucleotide
  modified_base 7: mod_base = OTHER; note = 2'-O-methyl modified nucleotide
  modified_base 8: mod_base = OTHER; note = 2'-O-methyl modified nucleotide
  modified_base 9: mod_base = OTHER; note = 2'-O-methyl modified nucleotide
  modified_base 10: mod_base = OTHER; note = 2'-O-methyl modified nucleotide
  modified_base 11: mod_base = OTHER; note = 2'-O-methyl modified nucleotide
  modified_base 12: mod_base = OTHER; note = 2'-O-methyl modified nucleotide
  modified_base 13: mod_base = OTHER; note = 2'-O-methyl modified nucleotide
  modified_base 14: mod_base = OTHER; note = 2'-fluoro modified nucleotide
  modified_base 15: mod_base = OTHER; note = 2'-O-methyl modified nucleotide
  modified_base 16: mod_base = OTHER; note = 2'-fluoro modified nucleotide
  modified_base 17: mod_base = OTHER; note = 2'-O-methyl modified nucleotide
  modified_base 18: mod_base = OTHER; note = 2'-O-methyl modified nucleotide
  modified_base 19: mod_base = OTHER; note = 2'-O-methyl modified nucleotide with phosphorothioate linkage
  modified_base 20: mod_base = OTHER; note = 2'-O-methyl modified nucleotide with phosphorothioate linkage
  modified_base 21: mod_base = OTHER; note = 2'-O-methyl modified nucleotide
tgtggtcatcacaatgctgag

SEQ ID NO: 928 - RNA, 21 nt, synthetic construct
  source 1..21: mol_type = other RNA
  modified_base 1: mod_base = OTHER; note = 2'-O-methyl modified nucleotide with phosphorothioate linkage
  modified_base 2: mod_base = OTHER; note = 2'-fluoro modified nucleotide with phosphorothioate linkage
  modified_base 3: mod_base = OTHER; note = 2'-O-methyl modified nucleotide
  modified_base 4: mod_base = OTHER; note = 2'-O-methyl modified nucleotide
  modified_base 5: mod_base = OTHER; note = 2'-O-methyl modified nucleotide
  modified_base 6: mod_base = OTHER; note = 2'-fluoro modified nucleotide
  modified_base 7: mod_base = OTHER; note = 2'-O-methyl modified nucleotide
  modified_base 8: mod_base = OTHER; note = 2'-O-methyl modified nucleotide
  modified_base 9: mod_base = OTHER; note = 2'-O-methyl modified nucleotide
  modified_base 10: mod_base = OTHER; note = 2'-O-methyl modified nucleotide
  modified_base 11: mod_base = OTHER; note = 2'-O-methyl modified nucleotide
  modified_base 12: mod_base = OTHER; note = 2'-O-methyl modified nucleotide
  modified_base 13: mod_base = OTHER; note = 2'-O-methyl modified nucleotide
  modified_base 14: mod_base = OTHER; note = 2'-fluoro modified nucleotide
  modified_base 15: mod_base = OTHER; note = 2'-O-methyl modified nucleotide
  modified_base 16: mod_base = OTHER; note = 2'-fluoro modified nucleotide
  modified_base 17: mod_base = OTHER; note = 2'-O-methyl modified nucleotide
  modified_base 18: mod_base = OTHER; note = 2'-O-methyl modified nucleotide
  modified_base 19: mod_base = OTHER; note = 2'-O-methyl modified nucleotide with phosphorothioate linkage
  modified_base 20: mod_base = OTHER; note = 2'-O-methyl modified nucleotide with phosphorothioate linkage
  modified_base 21: mod_base = OTHER; note = 2'-O-methyl modified nucleotide
tagcccagcgagagcatgatg

SEQ ID NO: 929 - RNA, 21 nt, synthetic construct
  source 1..21: mol_type = other RNA
  modified_base 1: mod_base = OTHER; note = 2'-O-methyl modified nucleotide with phosphorothioate linkage
  modified_base 2: mod_base = OTHER; note = 2'-fluoro modified nucleotide with phosphorothioate linkage
  modified_base 3: mod_base = OTHER; note = 2'-O-methyl modified nucleotide
  modified_base 4: mod_base = OTHER; note = 2'-O-methyl modified nucleotide
  modified_base 5: mod_base = OTHER; note = 2'-O-methyl modified nucleotide
  modified_base 6: mod_base = OTHER; note = 2'-fluoro modified nucleotide
  modified_base 7: mod_base = OTHER; note = 2'-O-methyl modified nucleotide
  modified_base 8: mod_base = OTHER; note = 2'-O-methyl modified nucleotide
  modified_base 9: mod_base = OTHER; note = 2'-O-methyl modified nucleotide
  modified_base 10: mod_base = OTHER; note = 2'-O-methyl modified nucleotide
  modified_base 11: mod_base = OTHER; note = 2'-O-methyl modified nucleotide
  modified_base 12: mod_base = OTHER; note = 2'-O-methyl modified nucleotide
  modified_base 13: mod_base = OTHER; note = 2'-O-methyl modified nucleotide
  modified_base 14: mod_base = OTHER; note = 2'-fluoro modified nucleotide
  modified_base 15: mod_base = OTHER; note = 2'-O-methyl modified nucleotide
  modified_base 16: mod_base = OTHER; note = 2'-fluoro modified nucleotide
  modified_base 17: mod_base = OTHER; note = 2'-O-methyl modified nucleotide
  modified_base 18: mod_base = OTHER; note = 2'-O-methyl modified nucleotide
  modified_base 19: mod_base = OTHER; note = 2'-O-methyl modified nucleotide with phosphorothioate linkage
  modified_base 20: mod_base = OTHER; note = 2'-O-methyl modified nucleotide with phosphorothioate linkage
  modified_base 21: mod_base = OTHER; note = 2'-O-methyl modified nucleotide
ttactgtgccaccagggcgat

SEQ ID NO: 930 - RNA, 21 nt, synthetic construct
  source 1..21: mol_type = other RNA
  modified_base 1: mod_base = OTHER; note = 2'-O-methyl modified nucleotide with phosphorothioate linkage
  modified_base 2: mod_base = OTHER; note = 2'-fluoro modified nucleotide with phosphorothioate linkage
  modified_base 3: mod_base = OTHER; note = 2'-O-methyl modified nucleotide
  modified_base 4: mod_base = OTHER; note = 2'-O-methyl modified nucleotide
  modified_base 5: mod_base = OTHER; note = 2'-O-methyl modified nucleotide
  modified_base 6: mod_base = OTHER; note = 2'-fluoro modified nucleotide
  modified_base 7: mod_base = OTHER; note = 2'-O-methyl modified nucleotide
  modified_base 8: mod_base = OTHER; note = 2'-O-methyl modified nucleotide
  modified_base 9: mod_base = OTHER; note = 2'-O-methyl modified nucleotide
  modified_base 10: mod_base = OTHER; note = 2'-O-methyl modified nucleotide
  modified_base 11: mod_base = OTHER; note = 2'-O-methyl modified nucleotide
  modified_base 12: mod_base = OTHER; note = 2'-O-methyl modified nucleotide
  modified_base 13: mod_base = OTHER; note = 2'-O-methyl modified nucleotide
  modified_base 14: mod_base = OTHER; note = 2'-fluoro modified nucleotide
  modified_base 15: mod_base = OTHER; note = 2'-O-methyl modified nucleotide
  modified_base 16: mod_base = OTHER; note = 2'-fluoro modified nucleotide
  modified_base 17: mod_base = OTHER; note = 2'-O-methyl modified nucleotide
  modified_base 18: mod_base = OTHER; note = 2'-O-methyl modified nucleotide
  modified_base 19: mod_base = OTHER; note = 2'-O-methyl modified nucleotide with phosphorothioate linkage
  modified_base 20: mod_base = OTHER; note = 2'-O-methyl modified nucleotide with phosphorothioate linkage
  modified_base 21: mod_base = OTHER; note = 2'-O-methyl modified nucleotide
tgtattgtggccgtttggatt

SEQ ID NO: 931 - RNA, 21 nt, synthetic construct
  source 1..21: mol_type = other RNA
  modified_base 1: mod_base = OTHER; note = 2'-O-methyl modified nucleotide with phosphorothioate linkage
  modified_base 2: mod_base = OTHER; note = 2'-fluoro modified nucleotide with phosphorothioate linkage
  modified_base 3: mod_base = OTHER; note = 2'-O-methyl modified nucleotide
  modified_base 4: mod_base = OTHER; note = 2'-O-methyl modified nucleotide
  modified_base 5: mod_base = OTHER; note = 2'-O-methyl modified nucleotide
  modified_base 6: mod_base = OTHER; note = 2'-fluoro modified nucleotide
  modified_base 7: mod_base = OTHER; note = 2'-O-methyl modified nucleotide
  modified_base 8: mod_base = OTHER; note = 2'-O-methyl modified nucleotide
  modified_base 9: mod_base = OTHER; note = 2'-O-methyl modified nucleotide
  modified_base 10: mod_base = OTHER; note = 2'-O-methyl modified nucleotide
  modified_base 11: mod_base = OTHER; note = 2'-O-methyl modified nucleotide
  modified_base 12: mod_base = OTHER; note = 2'-O-methyl modified nucleotide
  modified_base 13: mod_base = OTHER; note = 2'-O-methyl modified nucleotide
  modified_base 14: mod_base = OTHER; note = 2'-fluoro modified nucleotide
  modified_base 15: mod_base = OTHER; note = 2'-O-methyl modified nucleotide
  modified_base 16: mod_base = OTHER; note = 2'-fluoro modified nucleotide
  modified_base 17: mod_base = OTHER; note = 2'-O-methyl modified nucleotide
  modified_base 18: mod_base = OTHER; note = 2'-O-methyl modified nucleotide
  modified_base 19: mod_base = OTHER; note = 2'-O-methyl modified nucleotide with phosphorothioate linkage
  modified_base 20: mod_base = OTHER; note = 2'-O-methyl modified nucleotide with phosphorothioate linkage
  modified_base 21: mod_base = OTHER; note = 2'-O-methyl modified nucleotide
tgcgcatgtattgtggccgtt

SEQ ID NO: 932 - RNA, 21 nt, synthetic construct
  source 1..21: mol_type = other RNA
  modified_base 1: mod_base = OTHER; note = 2'-O-methyl modified nucleotide with phosphorothioate linkage
  modified_base 2: mod_base = OTHER; note = 2'-fluoro modified nucleotide with phosphorothioate linkage
  modified_base 3: mod_base = OTHER; note = 2'-O-methyl modified nucleotide
  modified_base 4: mod_base = OTHER; note = 2'-O-methyl modified nucleotide
  modified_base 5: mod_base = OTHER; note = 2'-O-methyl modified nucleotide
  modified_base 6: mod_base = OTHER; note = 2'-fluoro modified nucleotide
  modified_base 7: mod_base = OTHER; note = 2'-O-methyl modified nucleotide
  modified_base 8: mod_base = OTHER; note = 2'-O-methyl modified nucleotide
  modified_base 9: mod_base = OTHER; note = 2'-O-methyl modified nucleotide
  modified_base 10: mod_base = OTHER; note = 2'-O-methyl modified nucleotide
  modified_base 11: mod_base = OTHER; note = 2'-O-methyl modified nucleotide
  modified_base 12: mod_base = OTHER; note = 2'-O-methyl modified nucleotide
  modified_base 13: mod_base = OTHER; note = 2'-O-methyl modified nucleotide
  modified_base 14: mod_base = OTHER; note = 2'-fluoro modified nucleotide
  modified_base 15: mod_base = OTHER; note = 2'-O-methyl modified nucleotide
  modified_base 16: mod_base = OTHER; note = 2'-fluoro modified nucleotide
  modified_base 17: mod_base = OTHER; note = 2'-O-methyl modified nucleotide
  modified_base 18: mod_base = OTHER; note = 2'-O-methyl modified nucleotide
  modified_base 19: mod_base = OTHER; note = 2'-O-methyl modified nucleotide with phosphorothioate linkage
  modified_base 20: mod_base = OTHER; note = 2'-O-methyl modified nucleotide with phosphorothioate linkage
  modified_base 21: mod_base = OTHER; note = 2'-O-methyl modified nucleotide
tcttgatgacatagcgcatgt

SEQ ID NO: 933 - RNA, 21 nt, synthetic construct
  source 1..21: mol_type = other RNA
  modified_base 1: mod_base = OTHER; note = 2'-O-methyl modified nucleotide with phosphorothioate linkage
  modified_base 2: mod_base = OTHER; note = 2'-fluoro modified nucleotide with phosphorothioate linkage
  modified_base 3: mod_base = OTHER; note = 2'-O-methyl modified nucleotide
  modified_base 4: mod_base = OTHER; note = 2'-O-methyl modified nucleotide
  modified_base 5: mod_base = OTHER; note = 2'-O-methyl modified nucleotide
  modified_base 6: mod_base = OTHER; note = 2'-fluoro modified nucleotide
  modified_base 7: mod_base = OTHER; note = 2'-O-methyl modified nucleotide
  modified_base 8: mod_base = OTHER; note = 2'-O-methyl modified nucleotide
  modified_base 9: mod_base = OTHER; note = 2'-O-methyl modified nucleotide
  modified_base 10: mod_base = OTHER; note = 2'-O-methyl modified nucleotide
  modified_base 11: mod_base = OTHER; note = 2'-O-methyl modified nucleotide
  modified_base 12: mod_base = OTHER; note = 2'-O-methyl modified nucleotide
  modified_base 13: mod_base = OTHER; note = 2'-O-methyl modified nucleotide
  modified_base 14: mod_base = OTHER; note = 2'-fluoro modified nucleotide
  modified_base 15: mod_base = OTHER; note = 2'-O-methyl modified nucleotide
  modified_base 16: mod_base = OTHER; note = 2'-fluoro modified nucleotide
  modified_base 17: mod_base = OTHER; note = 2'-O-methyl modified nucleotide
  modified_base 18: mod_base = OTHER; note = 2'-O-methyl modified nucleotide
  modified_base 19: mod_base = OTHER; note = 2'-O-methyl modified nucleotide with phosphorothioate linkage
  modified_base 20: mod_base = OTHER; note = 2'-O-methyl modified nucleotide with phosphorothioate linkage
  modified_base 21: mod_base = OTHER; note = 2'-O-methyl modified nucleotide
tccttgatgacatagcgcatg

SEQ ID NO: 934 - RNA, 21 nt, synthetic construct
  source 1..21: mol_type = other RNA
  modified_base 1: mod_base = OTHER; note = 2'-O-methyl modified nucleotide with phosphorothioate linkage
  modified_base 2: mod_base = OTHER; note = 2'-fluoro modified nucleotide with phosphorothioate linkage
  modified_base 3: mod_base = OTHER; note = 2'-O-methyl modified nucleotide
  modified_base 4: mod_base = OTHER; note = 2'-O-methyl modified nucleotide
  modified_base 5: mod_base = OTHER; note = 2'-O-methyl modified nucleotide
  modified_base 6: mod_base = OTHER; note = 2'-fluoro modified nucleotide
  modified_base 7: mod_base = OTHER; note = 2'-O-methyl modified nucleotide
  modified_base 8: mod_base = OTHER; note = 2'-O-methyl modified nucleotide
  modified_base 9: mod_base = OTHER; note = 2'-O-methyl modified nucleotide
  modified_base 10: mod_base = OTHER; note = 2'-O-methyl modified nucleotide
  modified_base 11: mod_base = OTHER; note = 2'-O-methyl modified nucleotide
  modified_base 12: mod_base = OTHER; note = 2'-O-methyl modified nucleotide
  modified_base 13: mod_base = OTHER; note = 2'-O-methyl modified nucleotide
  modified_base 14: mod_base = OTHER; note = 2'-fluoro modified nucleotide
  modified_base 15: mod_base = OTHER; note = 2'-O-methyl modified nucleotide
  modified_base 16: mod_base = OTHER; note = 2'-fluoro modified nucleotide
  modified_base 17: mod_base = OTHER; note = 2'-O-methyl modified nucleotide
  modified_base 18: mod_base = OTHER; note = 2'-O-methyl modified nucleotide
  modified_base 19: mod_base = OTHER; note = 2'-O-methyl modified nucleotide with phosphorothioate linkage
  modified_base 20: mod_base = OTHER; note = 2'-O-methyl modified nucleotide with phosphorothioate linkage
  modified_base 21: mod_base = OTHER; note = 2'-O-methyl modified nucleotide
taggcagtggaagaccactcc

SEQ ID NO: 935 - RNA, 21 nt, synthetic construct
  source 1..21: mol_type = other RNA
  modified_base 1: mod_base = OTHER; note = 2'-O-methyl modified nucleotide with phosphorothioate linkage
  modified_base 2: mod_base = OTHER; note = 2'-fluoro modified nucleotide with phosphorothioate linkage
  modified_base 3: mod_base = OTHER; note = 2'-O-methyl modified nucleotide
  modified_base 4: mod_base = OTHER; note = 2'-O-methyl modified nucleotide
  modified_base 5: mod_base = OTHER; note = 2'-O-methyl modified nucleotide
  modified_base 6: mod_base = OTHER; note = 2'-fluoro modified nucleotide
  modified_base 7: mod_base = OTHER; note = 2'-O-methyl modified nucleotide
  modified_base 8: mod_base = OTHER; note = 2'-O-methyl modified nucleotide
  modified_base 9: mod_base = OTHER; note = 2'-O-methyl modified nucleotide
  modified_base 10: mod_base = OTHER; note = 2'-O-methyl modified nucleotide
  modified_base 11: mod_base = OTHER; note = 2'-O-methyl modified nucleotide
  modified_base 12: mod_base = OTHER; note = 2'-O-methyl modified nucleotide
  modified_base 13: mod_base = OTHER; note = 2'-O-methyl modified nucleotide
  modified_base 14: mod_base = OTHER; note = 2'-fluoro modified nucleotide
  modified_base 15: mod_base = OTHER; note = 2'-O-methyl modified nucleotide
  modified_base 16: mod_base = OTHER; note = 2'-fluoro modified nucleotide
  modified_base 17: mod_base = OTHER; note = 2'-O-methyl modified nucleotide
  modified_base 18: mod_base = OTHER; note = 2'-O-methyl modified nucleotide
  modified_base 19: mod_base = OTHER; note = 2'-O-methyl modified nucleotide with phosphorothioate linkage
  modified_base 20: mod_base = OTHER; note = 2'-O-methyl modified nucleotide with phosphorothioate linkage
  modified_base 21: mod_base = OTHER; note = 2'-O-methyl modified nucleotide
ttgcctttatagggcaccttg

SEQ ID NO: 936 - RNA, 21 nt, synthetic construct
  source 1..21: mol_type = other RNA
  modified_base 1: mod_base = OTHER; note = 2'-O-methyl modified nucleotide with phosphorothioate linkage
  modified_base 2: mod_base = OTHER; note = 2'-fluoro modified nucleotide with phosphorothioate linkage
  modified_base 3: mod_base = OTHER; note = 2'-O-methyl modified nucleotide
  modified_base 4: mod_base = OTHER; note = 2'-O-methyl modified nucleotide
  modified_base 5: mod_base = OTHER; note = 2'-O-methyl modified nucleotide
  modified_base 6: mod_base = OTHER; note = 2'-fluoro modified nucleotide
  modified_base 7: mod_base = OTHER; note = 2'-O-methyl modified nucleotide
  modified_base 8: mod_base = OTHER; note = 2'-O-methyl modified nucleotide
  modified_base 9: mod_base = OTHER; note = 2'-O-methyl modified nucleotide
  modified_base 10: mod_base = OTHER; note = 2'-O-methyl modified nucleotide
  modified_base 11: mod_base = OTHER; note = 2'-O-methyl modified nucleotide
  modified_base 12: mod_base = OTHER; note = 2'-O-methyl modified nucleotide
  modified_base 13: mod_base = OTHER; note = 2'-O-methyl modified nucleotide
  modified_base 14: mod_base = OTHER; note = 2'-fluoro modified nucleotide
  modified_base 15: mod_base = OTHER; note = 2'-O-methyl modified nucleotide
  modified_base 16: mod_base = OTHER; note = 2'-fluoro modified nucleotide
  modified_base 17: mod_base = OTHER; note = 2'-O-methyl modified nucleotide
  modified_base 18: mod_base = OTHER; note = 2'-O-methyl modified nucleotide
  modified_base 19: mod_base = OTHER; note = 2'-O-methyl modified nucleotide with phosphorothioate linkage
  modified_base 20: mod_base = OTHER; note = 2'-O-methyl modified nucleotide with phosphorothioate linkage
  modified_base 21: mod_base = OTHER; note = 2'-O-methyl modified nucleotide
tctaggctgtgcaaggggagc

SEQ ID NO: 937 - RNA, 21 nt, synthetic construct
  source 1..21: mol_type = other RNA
  modified_base 1: mod_base = OTHER; note = 2'-O-methyl modified nucleotide with phosphorothioate linkage
  modified_base 2: mod_base = OTHER; note = 2'-fluoro modified nucleotide with phosphorothioate linkage
  modified_base 3: mod_base = OTHER; note = 2'-O-methyl modified nucleotide
  modified_base 4: mod_base = OTHER; note = 2'-O-methyl modified nucleotide
  modified_base 5: mod_base = OTHER; note = 2'-O-methyl modified nucleotide
  modified_base 6: mod_base = OTHER; note = 2'-fluoro modified nucleotide
  modified_base 7: mod_base = OTHER; note = 2'-O-methyl modified nucleotide
  modified_base 8: mod_base = OTHER; note = 2'-O-methyl modified nucleotide
  modified_base 9: mod_base = OTHER; note = 2'-O-methyl modified nucleotide
  modified_base 10: mod_base = OTHER; note = 2'-O-methyl modified nucleotide
  modified_base 11: mod_base = OTHER; note = 2'-O-methyl modified nucleotide
  modified_base 12: mod_base = OTHER; note = 2'-O-methyl modified nucleotide
  modified_base 13: mod_base = OTHER; note = 2'-O-methyl modified nucleotide
  modified_base 14: mod_base = OTHER; note = 2'-fluoro modified nucleotide
  modified_base 15: mod_base = OTHER; note = 2'-O-methyl modified nucleotide
  modified_base 16: mod_base = OTHER; note = 2'-fluoro modified nucleotide
  modified_base 17: mod_base = OTHER; note = 2'-O-methyl modified nucleotide
  modified_base 18: mod_base = OTHER; note = 2'-O-methyl modified nucleotide
  modified_base 19: mod_base = OTHER; note = 2'-O-methyl modified nucleotide with phosphorothioate linkage
  modified_base 20: mod_base = OTHER; note = 2'-O-methyl modified nucleotide with phosphorothioate linkage
  modified_base 21: mod_base = OTHER; note = 2'-O-methyl modified nucleotide
tcccttgatgacatagcgcat

SEQ ID NO: 938 - RNA, 21 nt, synthetic construct
  source 1..21: mol_type = other RNA
  modified_base 1: mod_base = OTHER; note = 2'-O-methyl modified nucleotide with phosphorothioate linkage
  modified_base 2: mod_base = OTHER; note = 2'-fluoro modified nucleotide with phosphorothioate linkage
  modified_base 3: mod_base = OTHER; note = 2'-O-methyl modified nucleotide
  modified_base 4: mod_base = OTHER; note = 2'-O-methyl modified nucleotide
  modified_base 5: mod_base = OTHER; note = 2'-O-methyl modified nucleotide
  modified_base 6: mod_base = OTHER; note = 2'-fluoro modified nucleotide
  modified_base 7: mod_base = OTHER; note = 2'-O-methyl modified nucleotide
  modified_base 8: mod_base = OTHER; note = 2'-O-methyl modified nucleotide
  modified_base 9: mod_base = OTHER; note = 2'-O-methyl modified nucleotide
  modified_base 10: mod_base = OTHER; note = 2'-O-methyl modified nucleotide
  modified_base 11: mod_base = OTHER; note = 2'-O-methyl modified nucleotide
  modified_base 12: mod_base = OTHER; note = 2'-O-methyl modified nucleotide
  modified_base 13: mod_base = OTHER; note = 2'-O-methyl modified nucleotide
  modified_base 14: mod_base = OTHER; note = 2'-fluoro modified nucleotide
  modified_base 15: mod_base = OTHER; note = 2'-O-methyl modified nucleotide
  modified_base 16: mod_base = OTHER; note = 2'-fluoro modified nucleotide
  modified_base 17: mod_base = OTHER; note = 2'-O-methyl modified nucleotide
  modified_base 18: mod_base = OTHER; note = 2'-O-methyl modified nucleotide
  modified_base 19: mod_base = OTHER; note = 2'-O-methyl modified nucleotide with phosphorothioate linkage
  modified_base 20: mod_base = OTHER; note = 2'-O-methyl modified nucleotide with phosphorothioate linkage
  modified_base 21: mod_base = OTHER; note = 2'-O-methyl modified nucleotide
tcctttatagggcaccttgtc

SEQ ID NO: 939 - RNA, 21 nt, synthetic construct
  source 1..21: mol_type = other RNA
  modified_base 1: mod_base = OTHER; note = 2'-O-methyl modified nucleotide with phosphorothioate linkage
  modified_base 2: mod_base = OTHER; note = 2'-fluoro modified nucleotide with phosphorothioate linkage
  modified_base 3: mod_base = OTHER; note = 2'-O-methyl modified nucleotide
  modified_base 4: mod_base = OTHER; note = 2'-O-methyl modified nucleotide
  modified_base 5: mod_base = OTHER; note = 2'-O-methyl modified nucleotide
  modified_base 6: mod_base = OTHER; note = 2'-fluoro modified nucleotide
  modified_base 7: mod_base = OTHER; note = 2'-O-methyl modified nucleotide
  modified_base 8: mod_base = OTHER; note = 2'-O-methyl modified nucleotide
  modified_base 9: mod_base = OTHER; note = 2'-O-methyl modified nucleotide
  modified_base 10: mod_base = OTHER; note = 2'-O-methyl modified nucleotide
  modified_base 11: mod_base = OTHER; note = 2'-O-methyl modified nucleotide
  modified_base 12: mod_base = OTHER; note = 2'-O-methyl modified nucleotide
  modified_base 13: mod_base = OTHER; note = 2'-O-methyl modified nucleotide
  modified_base 14: mod_base = OTHER; note = 2'-fluoro modified nucleotide
  modified_base 15: mod_base = OTHER; note = 2'-O-methyl modified nucleotide
  modified_base 16: mod_base = OTHER; note = 2'-fluoro modified nucleotide
  modified_base 17: mod_base = OTHER; note = 2'-O-methyl modified nucleotide
  modified_base 18: mod_base = OTHER; note = 2'-O-methyl modified nucleotide
  modified_base 19: mod_base = OTHER; note = 2'-O-methyl modified nucleotide with phosphorothioate linkage
  modified_base 20: mod_base = OTHER; note = 2'-O-methyl modified nucleotide with phosphorothioate linkage
  modified_base 21: mod_base = OTHER; note = 2'-O-methyl modified nucleotide
ttgggttaaacatatatattg

SEQ ID NO: 940 - RNA, 21 nt, synthetic construct
  source 1..21: mol_type = other RNA
  modified_base 1: mod_base = OTHER; note = 2'-O-methyl modified nucleotide with phosphorothioate linkage
  modified_base 2: mod_base = OTHER; note = 2'-fluoro modified nucleotide with phosphorothioate linkage
  modified_base 3: mod_base = OTHER; note = 2'-O-methyl modified nucleotide
  modified_base 4: mod_base = OTHER; note = 2'-O-methyl modified nucleotide
  modified_base 5: mod_base = OTHER; note = 2'-O-methyl modified nucleotide
  modified_base 6: mod_base = OTHER; note = 2'-fluoro modified nucleotide
  modified_base 7: mod_base = OTHER; note = 2'-O-methyl modified nucleotide
  modified_base 8: mod_base = OTHER; note = 2'-O-methyl modified nucleotide
  modified_base 9: mod_base = OTHER; note = 2'-O-methyl modified nucleotide
  modified_base 10: mod_base = OTHER; note = 2'-O-methyl modified nucleotide
  modified_base 11: mod_base = OTHER; note = 2'-O-methyl modified nucleotide
  modified_base 12: mod_base = OTHER; note = 2'-O-methyl modified nucleotide
  modified_base 13: mod_base = OTHER; note = 2'-O-methyl modified nucleotide
  modified_base 14: mod_base = OTHER; note = 2'-fluoro modified nucleotide
  modified_base 15: mod_base = OTHER; note = 2'-O-methyl modified nucleotide
  modified_base 16: mod_base = OTHER; note = 2'-fluoro modified nucleotide
  modified_base 17: mod_base = OTHER; note = 2'-O-methyl modified nucleotide
  modified_base 18: mod_base = OTHER; note = 2'-O-methyl modified nucleotide
  modified_base 19: mod_base = OTHER; note = 2'-O-methyl modified nucleotide with phosphorothioate linkage
  modified_base 20: mod_base = OTHER; note = 2'-O-methyl modified nucleotide with phosphorothioate linkage
  modified_base 21: mod_base = OTHER; note = 2'-O-methyl modified nucleotide
tttatagggcaccttgtcctt

SEQ ID NO: 941 - RNA, 21 nt, synthetic construct
  source 1..21: mol_type = other RNA
  modified_base 1: mod_base = OTHER; note = 2'-O-methyl modified nucleotide with phosphorothioate linkage
  modified_base 2: mod_base = OTHER; note = 2'-fluoro modified nucleotide with phosphorothioate linkage
  modified_base 3: mod_base = OTHER; note = 2'-O-methyl modified nucleotide
  modified_base 4: mod_base = OTHER; note = 2'-O-methyl modified nucleotide
  modified_base 5: mod_base = OTHER; note = 2'-O-methyl modified nucleotide
  modified_base 6: mod_base = OTHER; note = 2'-fluoro modified nucleotide
  modified_base 7: mod_base = OTHER; note = 2'-O-methyl modified nucleotide
  modified_base 8: mod_base = OTHER; note = 2'-O-methyl modified nucleotide
  modified_base 9: mod_base = OTHER; note = 2'-O-methyl modified nucleotide
  modified_base 10: mod_base = OTHER; note = 2'-O-methyl modified nucleotide
  modified_base 11: mod_base = OTHER; note = 2'-O-methyl modified nucleotide
  modified_base 12: mod_base = OTHER; note = 2'-O-methyl modified nucleotide
  modified_base 13: mod_base = OTHER; note = 2'-O-methyl modified nucleotide
  modified_base 14: mod_base = OTHER; note = 2'-fluoro modified nucleotide
  modified_base 15: mod_base = OTHER; note = 2'-O-methyl modified nucleotide
  modified_base 16: mod_base = OTHER; note = 2'-fluoro modified nucleotide
  modified_base 17: mod_base = OTHER; note = 2'-O-methyl modified nucleotide
  modified_base 18: mod_base = OTHER; note = 2'-O-methyl modified nucleotide
  modified_base 19: mod_base = OTHER; note = 2'-O-methyl modified nucleotide with phosphorothioate linkage
  modified_base 20: mod_base = OTHER; note = 2'-O-methyl modified nucleotide with phosphorothioate linkage
  modified_base 21: mod_base = OTHER; note = 2'-O-methyl modified nucleotide
tcatccctcccttgatgacat

SEQ ID NO: 942 - RNA, 21 nt, synthetic construct
  source 1..21: mol_type = other RNA
  modified_base 1: mod_base = OTHER; note = 2'-O-methyl modified nucleotide with phosphorothioate linkage
  modified_base 2: mod_base = OTHER; note = 2'-fluoro modified nucleotide with phosphorothioate linkage
  modified_base 3: mod_base = OTHER; note = 2'-O-methyl modified nucleotide
  modified_base 4: mod_base = OTHER; note = 2'-O-methyl modified nucleotide
  modified_base 5: mod_base = OTHER; note = 2'-O-methyl modified nucleotide
  modified_base 6: mod_base = OTHER; note = 2'-fluoro modified nucleotide
  modified_base 7: mod_base = OTHER; note = 2'-O-methyl modified nucleotide
  modified_base 8: mod_base = OTHER; note = 2'-O-methyl modified nucleotide
  modified_base 9: mod_base = OTHER; note = 2'-O-methyl modified nucleotide
  modified_base 10: mod_base = OTHER; note = 2'-O-methyl modified nucleotide
  modified_base 11: mod_base = OTHER; note = 2'-O-methyl modified nucleotide
  modified_base 12: mod_base = OTHER; note = 2'-O-methyl modified nucleotide
  modified_base 13: mod_base = OTHER; note = 2'-O-methyl modified nucleotide
  modified_base 14: mod_base = OTHER; note = 2'-fluoro modified nucleotide
  modified_base 15: mod_base = OTHER; note = 2'-O-methyl modified nucleotide
  modified_base 16: mod_base = OTHER; note = 2'-fluoro modified nucleotide
  modified_base 17: mod_base = OTHER; note = 2'-O-methyl modified nucleotide
  modified_base 18: mod_base = OTHER; note = 2'-O-methyl modified nucleotide
  modified_base 19: mod_base = OTHER; note = 2'-O-methyl modified nucleotide with phosphorothioate linkage
  modified_base 20: mod_base = OTHER; note = 2'-O-methyl modified nucleotide with phosphorothioate linkage
  modified_base 21: mod_base = OTHER; note = 2'-O-methyl modified nucleotide
tcccagcgagagcatgatgaa

SEQ ID NO: 943 - RNA, 21 nt, synthetic construct
  source 1..21: mol_type = other RNA
  modified_base 1: mod_base = OTHER; note = 2'-O-methyl modified nucleotide with phosphorothioate linkage
  modified_base 2: mod_base = OTHER; note = 2'-fluoro modified nucleotide with phosphorothioate linkage
  modified_base 3: mod_base = OTHER; note = 2'-O-methyl modified nucleotide
  modified_base 4: mod_base = OTHER; note = 2'-O-methyl modified nucleotide
  modified_base 5: mod_base = OTHER; note = 2'-O-methyl modified nucleotide
  modified_base 6: mod_base = OTHER; note = 2'-fluoro modified nucleotide
  modified_base 7: mod_base = OTHER; note = 2'-O-methyl modified nucleotide
  modified_base 8: mod_base = OTHER; note = 2'-O-methyl modified nucleotide
  modified_base 9: mod_base = OTHER; note = 2'-O-methyl modified nucleotide
  modified_base 10: mod_base = OTHER; note = 2'-O-methyl modified nucleotide
  modified_base 11: mod_base = OTHER; note = 2'-O-methyl modified nucleotide
  modified_base 12: mod_base = OTHER; note = 2'-O-methyl modified nucleotide
  modified_base 13: mod_base = OTHER; note = 2'-O-methyl modified nucleotide
  modified_base 14: mod_base = OTHER; note = 2'-fluoro modified nucleotide
  modified_base 15: mod_base = OTHER; note = 2'-O-methyl modified nucleotide
  modified_base 16: mod_base = OTHER; note = 2'-fluoro modified nucleotide
  modified_base 17: mod_base = OTHER; note = 2'-O-methyl modified nucleotide
  modified_base 18: mod_base = OTHER; note = 2'-O-methyl modified nucleotide
  modified_base 19: mod_base = OTHER; note = 2'-O-methyl modified nucleotide with phosphorothioate linkage
  modified_base 20: mod_base = OTHER; note = 2'-O-methyl modified nucleotide with phosphorothioate linkage
  modified_base 21: mod_base = OTHER; note = 2'-O-methyl modified nucleotide
tgcagtggaagaccactcctt

SEQ ID NO: 944 - RNA, 21 nt, synthetic construct
  source 1..21: mol_type = other RNA
  modified_base 1: mod_base = OTHER; note = 2'-O-methyl modified nucleotide with phosphorothioate linkage
  modified_base 2: mod_base = OTHER; note = 2'-fluoro modified nucleotide with phosphorothioate linkage
  modified_base 3: mod_base = OTHER; note = 2'-O-methyl modified nucleotide
  modified_base 4: mod_base = OTHER; note = 2'-O-methyl modified nucleotide
  modified_base 5: mod_base = OTHER; note = 2'-O-methyl modified nucleotide
  modified_base 6: mod_base = OTHER; note = 2'-fluoro modified nucleotide
  modified_base 7: mod_base = OTHER; note = 2'-O-methyl modified nucleotide
  modified_base 8: mod_base = OTHER; note = 2'-O-methyl modified nucleotide
  modified_base 9: mod_base = OTHER; note = 2'-O-methyl modified nucleotide
  modified_base 10: mod_base = OTHER; note = 2'-O-methyl modified nucleotide
  modified_base 11: mod_base = OTHER; note = 2'-O-methyl modified nucleotide
  modified_base 12: mod_base = OTHER; note = 2'-O-methyl modified nucleotide
  modified_base 13: mod_base = OTHER; note = 2'-O-methyl modified nucleotide
  modified_base 14: mod_base = OTHER; note = 2'-fluoro modified nucleotide
  modified_base 15: mod_base = OTHER; note = 2'-O-methyl modified nucleotide
  modified_base 16: mod_base = OTHER; note = 2'-fluoro modified nucleotide
  modified_base 17: mod_base = OTHER; note = 2'-O-methyl modified nucleotide
  modified_base 18: mod_base = OTHER; note = 2'-O-methyl modified nucleotide
  modified_base 19: mod_base = OTHER; note = 2'-O-methyl modified nucleotide with phosphorothioate linkage
  modified_base 20: mod_base = OTHER; note = 2'-O-methyl modified nucleotide with phosphorothioate linkage
  modified_base 21: mod_base = OTHER; note = 2'-O-methyl modified nucleotide
ttggccagactgaagacattg

SEQ ID NO: 945 - RNA, 21 nt, synthetic construct
  source 1..21: mol_type = other RNA
  modified_base 1: mod_base = OTHER; note = 2'-O-methyl modified nucleotide with phosphorothioate linkage
  modified_base 2: mod_base = OTHER; note = 2'-fluoro modified nucleotide with phosphorothioate linkage
  modified_base 3: mod_base = OTHER; note = 2'-O-methyl modified nucleotide
  modified_base 4: mod_base = OTHER; note = 2'-O-methyl modified nucleotide
  modified_base 5: mod_base = OTHER; note = 2'-O-methyl modified nucleotide
  modified_base 6: mod_base = OTHER; note = 2'-fluoro modified nucleotide
  modified_base 7: mod_base = OTHER; note = 2'-O-methyl modified nucleotide
  modified_base 8: mod_base = OTHER; note = 2'-O-methyl modified nucleotide
  modified_base 9: mod_base = OTHER; note = 2'-O-methyl modified nucleotide
  modified_base 10: mod_base = OTHER; note = 2'-O-methyl modified nucleotide
  modified_base 11: mod_base = OTHER; note = 2'-O-methyl modified nucleotide
  modified_base 12: mod_base = OTHER; note = 2'-O-methyl modified nucleotide
  modified_base 13: mod_base = OTHER; note = 2'-O-methyl modified nucleotide
  modified_base 14: mod_base = OTHER; note = 2'-fluoro modified nucleotide
  modified_base 15: mod_base = OTHER; note = 2'-O-methyl modified nucleotide
  modified_base 16: mod_base = OTHER; note = 2'-fluoro modified nucleotide
  modified_base 17: mod_base = OTHER; note = 2'-O-methyl modified nucleotide
  modified_base 18: mod_base = OTHER; note = 2'-O-methyl modified nucleotide
  modified_base 19: mod_base = OTHER; note = 2'-O-methyl modified nucleotide with phosphorothioate linkage
  modified_base 20: mod_base = OTHER; note = 2'-O-methyl modified nucleotide with phosphorothioate linkage
  modified_base 21: mod_base = OTHER; note = 2'-O-methyl modified nucleotide
tgaggacgatccctatggtgc

SEQ ID NO: 946 - RNA, 21 nt, synthetic construct
  source 1..21: mol_type = other RNA
  modified_base 1: mod_base = OTHER; note = 2'-O-methyl modified nucleotide with phosphorothioate linkage
  modified_base 2: mod_base = OTHER; note = 2'-fluoro modified nucleotide with phosphorothioate linkage
  modified_base 3: mod_base = OTHER; note = 2'-O-methyl modified nucleotide
  modified_base 4: mod_base = OTHER; note = 2'-O-methyl modified nucleotide
  modified_base 5: mod_base = OTHER; note = 2'-O-methyl modified nucleotide
  modified_base 6: mod_base = OTHER; note = 2'-fluoro modified nucleotide
  modified_base 7: mod_base = OTHER; note = 2'-O-methyl modified nucleotide
  modified_base 8: mod_base = OTHER; note = 2'-O-methyl modified nucleotide
  modified_base 9: mod_base = OTHER; note = 2'-O-methyl modified nucleotide
  modified_base 10: mod_base = OTHER; note = 2'-O-methyl modified nucleotide
  modified_base 11: mod_base = OTHER; note = 2'-O-methyl modified nucleotide
  modified_base 12: mod_base = OTHER; note = 2'-O-methyl modified nucleotide
  modified_base 13: mod_base = OTHER; note = 2'-O-methyl modified nucleotide
  modified_base 14: mod_base = OTHER; note = 2'-fluoro modified nucleotide
  modified_base 15: mod_base = OTHER; note = 2'-O-methyl modified nucleotide
  modified_base 16: mod_base = OTHER; note = 2'-fluoro modified nucleotide
  modified_base 17: mod_base = OTHER; note = 2'-O-methyl modified nucleotide
  modified_base 18: mod_base = OTHER; note = 2'-O-methyl modified nucleotide
  modified_base 19: mod_base = OTHER; note = 2'-O-methyl modified nucleotide with phosphorothioate linkage
  modified_base 20: mod_base = OTHER; note = 2'-O-methyl modified nucleotide with phosphorothioate linkage
  modified_base 21: mod_base = OTHER; note = 2'-O-methyl modified nucleotide
ttaacccagcagaaagccaat

SEQ ID NO: 947 - RNA, 21 nt, synthetic construct
  source 1..21: mol_type = other RNA
  modified_base 1: mod_base = OTHER; note = 2'-O-methyl modified nucleotide with phosphorothioate linkage
  modified_base 2: mod_base = OTHER; note = 2'-fluoro modified nucleotide with phosphorothioate linkage
  modified_base 3: mod_base = OTHER; note = 2'-O-methyl modified nucleotide
  modified_base 4: mod_base = OTHER; note = 2'-O-methyl modified nucleotide
  modified_base 5: mod_base = OTHER; note = 2'-O-methyl modified nucleotide
  modified_base 6: mod_base = OTHER; note = 2'-fluoro modified nucleotide
  modified_base 7: mod_base = OTHER; note = 2'-O-methyl modified nucleotide
  modified_base 8: mod_base = OTHER; note = 2'-O-methyl modified nucleotide
  modified_base 9: mod_base = OTHER; note = 2'-O-methyl modified nucleotide
  modified_base 10: mod_base = OTHER; note = 2'-O-methyl modified nucleotide
  modified_base 11: mod_base = OTHER; note = 2'-O-methyl modified nucleotide
  modified_base 12: mod_base = OTHER; note = 2'-O-methyl modified nucleotide
  modified_base 13: mod_base = OTHER; note = 2'-O-methyl modified nucleotide
  modified_base 14: mod_base = OTHER; note = 2'-fluoro modified nucleotide
  modified_base 15: mod_base = OTHER; note = 2'-O-methyl modified nucleotide
  modified_base 16: mod_base = OTHER; note = 2'-fluoro modified nucleotide
  modified_base 17: mod_base = OTHER; note = 2'-O-methyl modified nucleotide
  modified_base 18: mod_base = OTHER; note = 2'-O-methyl modified nucleotide
  modified_base 19: mod_base = OTHER; note = 2'-O-methyl modified nucleotide with phosphorothioate linkage
  modified_base 20: mod_base = OTHER; note = 2'-O-methyl modified nucleotide with phosphorothioate linkage
  modified_base 21: mod_base = OTHER; note = 2'-O-methyl modified nucleotide
tacggccacactgcacaagag

SEQ ID NO: 948 - RNA, 21 nt, synthetic construct
  source 1..21: mol_type = other RNA
  modified_base 1: mod_base = OTHER; note = 2'-O-methyl modified nucleotide with phosphorothioate linkage
  modified_base 2: mod_base = OTHER; note = 2'-fluoro modified nucleotide with phosphorothioate linkage
  modified_base 3: mod_base = OTHER; note = 2'-O-methyl modified nucleotide
  modified_base 4: mod_base = OTHER; note = 2'-O-methyl modified nucleotide
  modified_base 5: mod_base = OTHER; note = 2'-O-methyl modified nucleotide
  modified_base 6: mod_base = OTHER; note = 2'-fluoro modified nucleotide
  modified_base 7: mod_base = OTHER; note = 2'-O-methyl modified nucleotide
  modified_base 8: mod_base = OTHER; note = 2'-O-methyl modified nucleotide
  modified_base 9: mod_base = OTHER; note = 2'-O-methyl modified nucleotide
  modified_base 10: mod_base = OTHER; note = 2'-O-methyl modified nucleotide
  modified_base 11: mod_base = OTHER; note = 2'-O-methyl modified nucleotide
  modified_base 12: mod_base = OTHER; note = 2'-O-methyl modified nucleotide
  modified_base 13: mod_base = OTHER; note = 2'-O-methyl modified nucleotide
  modified_base 14: mod_base = OTHER; note = 2'-fluoro modified nucleotide
  modified_base 15: mod_base = OTHER; note = 2'-O-methyl modified nucleotide
  modified_base 16: mod_base = OTHER; note = 2'-fluoro modified nucleotide
  modified_base 17: mod_base = OTHER; note = 2'-O-methyl modified nucleotide
  modified_base 18: mod_base = OTHER; note = 2'-O-methyl modified nucleotide
  modified_base 19: mod_base = OTHER; note = 2'-O-methyl modified nucleotide with phosphorothioate linkage
  modified_base 20: mod_base = OTHER; note = 2'-O-methyl modified nucleotide with phosphorothioate linkage
  modified_base 21: mod_base = OTHER; note = 2'-O-methyl modified nucleotide
taactgtgacggccacactgc

SEQ ID NO: 949 - RNA, 21 nt, synthetic construct
  source 1..21: mol_type = other RNA
  modified_base 1: mod_base = OTHER; note = 2'-O-methyl modified nucleotide with phosphorothioate linkage
  modified_base 2: mod_base = OTHER; note = 2'-fluoro modified nucleotide with phosphorothioate linkage
  modified_base 3: mod_base = OTHER; note = 2'-O-methyl modified nucleotide
  modified_base 4: mod_base = OTHER; note = 2'-O-methyl modified nucleotide
  modified_base 5: mod_base = OTHER; note = 2'-O-methyl modified nucleotide
  modified_base 6: mod_base = OTHER; note = 2'-fluoro modified nucleotide
  modified_base 7: mod_base = OTHER; note = 2'-O-methyl modified nucleotide
  modified_base 8: mod_base = OTHER; note = 2'-O-methyl modified nucleotide
  modified_base 9: mod_base = OTHER; note = 2'-O-methyl modified nucleotide
  modified_base 10: mod_base = OTHER; note = 2'-O-methyl modified nucleotide
  modified_base 11: mod_base = OTHER; note = 2'-O-methyl modified nucleotide
  modified_base 12: mod_base = OTHER; note = 2'-O-methyl modified nucleotide
  modified_base 13: mod_base = OTHER; note = 2'-O-methyl modified nucleotide
  modified_base 14: mod_base = OTHER; note = 2'-fluoro modified nucleotide
  modified_base 15: mod_base = OTHER; note = 2'-O-methyl modified nucleotide
  modified_base 16: mod_base = OTHER; note = 2'-fluoro modified nucleotide
  modified_base 17: mod_base = OTHER; note = 2'-O-methyl modified nucleotide
  modified_base 18: mod_base = OTHER; note = 2'-O-methyl modified nucleotide
  modified_base 19: mod_base = OTHER; note = 2'-O-methyl modified nucleotide with phosphorothioate linkage
  modified_base 20: mod_base = OTHER; note = 2'-O-methyl modified nucleotide with phosphorothioate linkage
  modified_base 21: mod_base = OTHER; note = 2'-O-methyl modified nucleotide
tgacgatccctatggtgcaag

SEQ ID NO: 950 - RNA, 21 nt, synthetic construct
  source 1..21: mol_type = other RNA
  modified_base 1: mod_base = OTHER; note = 2'-O-methyl modified nucleotide with phosphorothioate linkage
  modified_base 2: mod_base = OTHER; note = 2'-fluoro modified nucleotide with phosphorothioate linkage
  modified_base 3: mod_base = OTHER; note = 2'-O-methyl modified nucleotide
  modified_base 4: mod_base = OTHER; note = 2'-O-methyl modified nucleotide
  modified_base 5: mod_base = OTHER; note = 2'-O-methyl modified nucleotide
  modified_base 6: mod_base = OTHER; note = 2'-fluoro modified nucleotide
  modified_base 7: mod_base = OTHER; note = 2'-O-methyl modified nucleotide
  modified_base 8: mod_base = OTHER; note = 2'-O-methyl modified nucleotide
  modified_base 9: mod_base = OTHER; note = 2'-O-methyl modified nucleotide
  modified_base 10: mod_base = OTHER; note = 2'-O-methyl modified nucleotide
  modified_base 11: mod_base = OTHER; note = 2'-O-methyl modified nucleotide
  modified_base 12: mod_base = OTHER; note = 2'-O-methyl modified nucleotide
  modified_base 13: mod_base = OTHER; note = 2'-O-methyl modified nucleotide
  modified_base 14: mod_base = OTHER; note = 2'-fluoro modified nucleotide
  modified_base 15: mod_base = OTHER; note = 2'-O-methyl modified nucleotide
  modified_base 16: mod_base = OTHER; note = 2'-fluoro modified nucleotide
  modified_base 17: mod_base = OTHER; note = 2'-O-methyl modified nucleotide
  modified_base 18: mod_base = OTHER; note = 2'-O-methyl modified nucleotide
  modified_base 19: mod_base = OTHER; note = 2'-O-methyl modified nucleotide with phosphorothioate linkage
  modified_base 20: mod_base = OTHER; note = 2'-O-methyl modified nucleotide with phosphorothioate linkage
  modified_base 21: mod_base = OTHER; note = 2'-O-methyl modified nucleotide
taggcttccataagtgagcct

SEQ ID NO: 951 - RNA, 21 nt, synthetic construct
  source 1..21: mol_type = other RNA
  modified_base 1: mod_base = OTHER; note = 2'-O-methyl modified nucleotide with phosphorothioate linkage
  modified_base 2: mod_base = OTHER; note = 2'-fluoro modified nucleotide with phosphorothioate linkage
  modified_base 3: mod_base = OTHER; note = 2'-O-methyl modified nucleotide
  modified_base 4: mod_base = OTHER; note = 2'-O-methyl modified nucleotide
  modified_base 5: mod_base = OTHER; note = 2'-O-methyl modified nucleotide
  modified_base 6: mod_base = OTHER; note = 2'-fluoro modified nucleotide
  modified_base 7: mod_base = OTHER; note = 2'-O-methyl modified nucleotide
  modified_base 8: mod_base = OTHER; note = 2'-O-methyl modified nucleotide
  modified_base 9: mod_base = OTHER; note = 2'-O-methyl modified nucleotide
  modified_base 10: mod_base = OTHER; note = 2'-O-methyl modified nucleotide
  modified_base 11: mod_base = OTHER; note = 2'-O-methyl modified nucleotide
  modified_base 12: mod_base = OTHER; note = 2'-O-methyl modified nucleotide
  modified_base 13: mod_base = OTHER; note = 2'-O-methyl modified nucleotide
  modified_base 14: mod_base = OTHER; note = 2'-fluoro modified nucleotide
  modified_base 15: mod_base = OTHER; note = 2'-O-methyl modified nucleotide
  modified_base 16: mod_base = OTHER; note = 2'-fluoro modified nucleotide
  modified_base 17: mod_base = OTHER; note = 2'-O-methyl modified nucleotide
  modified_base 18: mod_base = OTHER; note = 2'-O-methyl modified nucleotide
  modified_base 19: mod_base = OTHER; note = 2'-O-methyl modified nucleotide with phosphorothioate linkage
  modified_base 20: mod_base = OTHER; note = 2'-O-methyl modified nucleotide with phosphorothioate linkage
  modified_base 21: mod_base = OTHER; note = 2'-O-methyl modified nucleotide
taggacgatccctatggtgca

SEQ ID NO: 952 - RNA, 21 nt, synthetic construct
  source 1..21: mol_type = other RNA
  modified_base 1: mod_base = OTHER; note = 2'-O-methyl modified nucleotide with phosphorothioate linkage
  modified_base 2: mod_base = OTHER; note = 2'-fluoro modified nucleotide with phosphorothioate linkage
  modified_base 3: mod_base = OTHER; note = 2'-O-methyl modified nucleotide
  modified_base 4: mod_base = OTHER; note = 2'-O-methyl modified nucleotide
  modified_base 5: mod_base = OTHER; note = 2'-O-methyl modified nucleotide
  modified_base 6: mod_base = OTHER; note = 2'-fluoro modified nucleotide
  modified_base 7: mod_base = OTHER; note = 2'-O-methyl modified nucleotide
  modified_base 8: mod_base = OTHER; note = 2'-O-methyl modified nucleotide
  modified_base 9: mod_base = OTHER; note = 2'-O-methyl modified nucleotide
  modified_base 10: mod_base = OTHER; note = 2'-O-methyl modified nucleotide
  modified_base 11: mod_base = OTHER; note = 2'-O-methyl modified nucleotide
  modified_base 12: mod_base = OTHER; note = 2'-O-methyl modified nucleotide
  modified_base 13: mod_base = OTHER; note = 2'-O-methyl modified nucleotide
  modified_base 14: mod_base = OTHER; note = 2'-fluoro modified nucleotide
  modified_base 15: mod_base = OTHER; note = 2'-O-methyl modified nucleotide
  modified_base 16: mod_base = OTHER; note = 2'-fluoro modified nucleotide
  modified_base 17: mod_base = OTHER; note = 2'-O-methyl modified nucleotide
  modified_base 18: mod_base = OTHER; note = 2'-O-methyl modified nucleotide
  modified_base 19: mod_base = OTHER; note = 2'-O-methyl modified nucleotide with phosphorothioate linkage
  modified_base 20: mod_base = OTHER; note = 2'-O-methyl modified nucleotide with phosphorothioate linkage
  modified_base 21: mod_base = OTHER; note = 2'-O-methyl modified nucleotide
taatcatgtagaggaggggaa

SEQ ID NO: 953 - RNA, 21 nt, synthetic construct
  source 1..21: mol_type = other RNA
  modified_base 1: mod_base = OTHER; note = 2'-O-methyl modified nucleotide with phosphorothioate linkage
  modified_base 2: mod_base = OTHER; note = 2'-fluoro modified nucleotide with phosphorothioate linkage
  modified_base 3: mod_base = OTHER; note = 2'-O-methyl modified nucleotide
  modified_base 4: mod_base = OTHER; note = 2'-O-methyl modified nucleotide
  modified_base 5: mod_base = OTHER; note = 2'-O-methyl modified nucleotide
  modified_base 6: mod_base = OTHER; note = 2'-fluoro modified nucleotide
  modified_base 7: mod_base = OTHER; note = 2'-O-methyl modified nucleotide
  modified_base 8: mod_base = OTHER; note = 2'-O-methyl modified nucleotide
  modified_base 9: mod_base = OTHER; note = 2'-O-methyl modified nucleotide
  modified_base 10: mod_base = OTHER; note = 2'-O-methyl modified nucleotide
  modified_base 11: mod_base = OTHER; note = 2'-O-methyl modified nucleotide
  modified_base 12: mod_base = OTHER; note = 2'-O-methyl modified nucleotide
  modified_base 13: mod_base = OTHER; note = 2'-O-methyl modified nucleotide
  modified_base 14: mod_base = OTHER; note = 2'-fluoro modified nucleotide
  modified_base 15: mod_base = OTHER; note = 2'-O-methyl modified nucleotide
  modified_base 16: mod_base = OTHER; note = 2'-fluoro modified nucleotide
  modified_base 17: mod_base = OTHER; note = 2'-O-methyl modified nucleotide
  modified_base 18: mod_base = OTHER; note = 2'-O-methyl modified nucleotide
  modified_base 19: mod_base = OTHER; note = 2'-O-methyl modified nucleotide with phosphorothioate linkage
  modified_base 20: mod_base = OTHER; note = 2'-O-methyl modified nucleotide with phosphorothioate linkage
  modified_base 21: mod_base = OTHER; note = 2'-O-methyl modified nucleotide
ttaggctgtgcaaggggagca

SEQ ID NO: 954 - RNA, 21 nt, synthetic construct
  source 1..21: mol_type = other RNA
  modified_base 1: mod_base = OTHER; note = 2'-O-methyl modified nucleotide with phosphorothioate linkage
  modified_base 2: mod_base = OTHER; note = 2'-fluoro modified nucleotide with phosphorothioate linkage
  modified_base 3: mod_base = OTHER; note = 2'-O-methyl modified nucleotide
  modified_base 4: mod_base = OTHER; note = 2'-O-methyl modified nucleotide
  modified_base 5: mod_base = OTHER; note = 2'-O-methyl modified nucleotide
  modified_base 6: mod_base = OTHER; note = 2'-fluoro modified nucleotide
  modified_base 7: mod_base = OTHER; note = 2'-O-methyl modified nucleotide
  modified_base 8: mod_base = OTHER; note = 2'-O-methyl modified nucleotide
  modified_base 9: mod_base = OTHER; note = 2'-O-methyl modified nucleotide
  modified_base 10: mod_base = OTHER; note = 2'-O-methyl modified nucleotide
  modified_base 11: mod_base = OTHER; note = 2'-O-methyl modified nucleotide
  modified_base 12: mod_base = OTHER; note = 2'-O-methyl modified nucleotide
  modified_base 13: mod_base = OTHER; note = 2'-O-methyl modified nucleotide
  modified_base 14: mod_base = OTHER; note = 2'-fluoro modified nucleotide
  modified_base 15: mod_base = OTHER; note = 2'-O-methyl modified nucleotide
  modified_base 16: mod_base = OTHER; note = 2'-fluoro modified nucleotide
  modified_base 17: mod_base = OTHER; note = 2'-O-methyl modified nucleotide
  modified_base 18: mod_base = OTHER; note = 2'-O-methyl modified nucleotide
  modified_base 19: mod_base = OTHER; note = 2'-O-methyl modified nucleotide with phosphorothioate linkage
  modified_base 20: mod_base = OTHER; note = 2'-O-methyl modified nucleotide with phosphorothioate linkage
  modified_base 21: mod_base = OTHER; note = 2'-O-methyl modified nucleotide
tatgtattgtggccgtttgga

SEQ ID NO: 955 - RNA, 21 nt, synthetic construct
  source 1..21: mol_type = other RNA
  modified_base 1: mod_base = OTHER; note = 2'-O-methyl modified nucleotide with phosphorothioate linkage
  modified_base 2: mod_base = OTHER; note = 2'-fluoro modified nucleotide with phosphorothioate linkage
  modified_base 3: mod_base = OTHER; note = 2'-O-methyl modified nucleotide
  modified_base 4: mod_base = OTHER; note = 2'-O-methyl modified nucleotide
  modified_base 5: mod_base = OTHER; note = 2'-O-methyl modified nucleotide
  modified_base 6: mod_base = OTHER; note = 2'-fluoro modified nucleotide
  modified_base 7: mod_base = OTHER; note = 2'-O-methyl modified nucleotide
  modified_base 8: mod_base = OTHER; note = 2'-O-methyl modified nucleotide
  modified_base 9: mod_base = OTHER; note = 2'-O-methyl modified nucleotide
  modified_base 10: mod_base = OTHER; note = 2'-O-methyl modified nucleotide
  modified_base 11: mod_base = OTHER; note = 2'-O-methyl modified nucleotide
  modified_base 12: mod_base = OTHER; note = 2'-O-methyl modified nucleotide
  modified_base 13: mod_base = OTHER; note = 2'-O-methyl modified nucleotide
  modified_base 14: mod_base = OTHER; note = 2'-fluoro modified nucleotide
  modified_base 15: mod_base = OTHER; note = 2'-O-methyl modified nucleotide
  modified_base 16: mod_base = OTHER; note = 2'-fluoro modified nucleotide
  modified_base 17: mod_base = OTHER; note = 2'-O-methyl modified nucleotide
  modified_base 18: mod_base = OTHER; note = 2'-O-methyl modified nucleotide
  modified_base 19: mod_base = OTHER; note = 2'-O-methyl modified nucleotide with phosphorothioate linkage
  modified_base 20: mod_base = OTHER; note = 2'-O-methyl modified nucleotide with phosphorothioate linkage
  modified_base 21: mod_base = OTHER; note = 2'-O-methyl modified nucleotide
tagccaataaaaggcatcagg

SEQ ID NO: 956 - RNA, 21 nt, synthetic construct
  source 1..21: mol_type = other RNA
  modified_base 1: mod_base = OTHER; note = 2'-O-methyl modified nucleotide with phosphorothioate linkage
  modified_base 2: mod_base = OTHER; note = 2'-fluoro modified nucleotide with phosphorothioate linkage
  modified_base 3: mod_base = OTHER; note = 2'-O-methyl modified nucleotide
  modified_base 4: mod_base = OTHER; note = 2'-O-methyl modified nucleotide
  modified_base 5: mod_base = OTHER; note = 2'-O-methyl modified nucleotide
  modified_base 6: mod_base = OTHER; note = 2'-fluoro modified nucleotide
  modified_base 7: mod_base = OTHER; note = 2'-O-methyl modified nucleotide
  modified_base 8: mod_base = OTHER; note = 2'-O-methyl modified nucleotide
  modified_base 9: mod_base = OTHER; note = 2'-O-methyl modified nucleotide
  modified_base 10: mod_base = OTHER; note = 2'-O-methyl modified nucleotide
  modified_base 11: mod_base = OTHER; note = 2'-O-methyl modified nucleotide
  modified_base 12: mod_base = OTHER; note = 2'-O-methyl modified nucleotide
  modified_base 13: mod_base = OTHER; note = 2'-O-methyl modified nucleotide
  modified_base 14: mod_base = OTHER; note = 2'-fluoro modified nucleotide
  modified_base 15: mod_base = OTHER; note = 2'-O-methyl modified nucleotide
  modified_base 16: mod_base = OTHER; note = 2'-fluoro modified nucleotide
  modified_base 17: mod_base = OTHER; note = 2'-O-methyl modified nucleotide
  modified_base 18: mod_base = OTHER; note = 2'-O-methyl modified nucleotide
  modified_base 19: mod_base = OTHER; note = 2'-O-methyl modified nucleotide with phosphorothioate linkage
  modified_base 20: mod_base = OTHER; note = 2'-O-methyl modified nucleotide with phosphorothioate linkage
  modified_base 21: mod_base = OTHER; note = 2'-O-methyl modified nucleotide
tacgatccctatggtgcaagg

SEQ ID NO: 957 - RNA, 21 nt, synthetic construct
  source 1..21: mol_type = other RNA
  modified_base 1: mod_base = OTHER; note = 2'-O-methyl modified nucleotide with phosphorothioate linkage
  modified_base 2: mod_base = OTHER; note = 2'-fluoro modified nucleotide with phosphorothioate linkage
  modified_base 3: mod_base = OTHER; note = 2'-O-methyl modified nucleotide
  modified_base 4: mod_base = OTHER; note = 2'-O-methyl modified nucleotide
  modified_base 5: mod_base = OTHER; note = 2'-O-methyl modified nucleotide
  modified_base 6: mod_base = OTHER; note = 2'-fluoro modified nucleotide
  modified_base 7: mod_base = OTHER; note = 2'-O-methyl modified nucleotide
  modified_base 8: mod_base = OTHER; note = 2'-O-methyl modified nucleotide
  modified_base 9: mod_base = OTHER; note = 2'-O-methyl modified nucleotide
  modified_base 10: mod_base = OTHER; note = 2'-O-methyl modified nucleotide
  modified_base 11: mod_base = OTHER; note = 2'-O-methyl modified nucleotide
  modified_base 12: mod_base = OTHER; note = 2'-O-methyl modified nucleotide
  modified_base 13: mod_base = OTHER; note = 2'-O-methyl modified nucleotide
  modified_base 14: mod_base = OTHER; note = 2'-fluoro modified nucleotide
  modified_base 15: mod_base = OTHER; note = 2'-O-methyl modified nucleotide
  modified_base 16: mod_base = OTHER; note = 2'-fluoro modified nucleotide
  modified_base 17: mod_base = OTHER; note = 2'-O-methyl modified nucleotide
  modified_base 18: mod_base = OTHER; note = 2'-O-methyl modified nucleotide
  modified_base 19: mod_base = OTHER; note = 2'-O-methyl modified nucleotide with phosphorothioate linkage
  modified_base 20: mod_base = OTHER; note = 2'-O-methyl modified nucleotide with phosphorothioate linkage
  modified_base 21: mod_base = OTHER; note = 2'-O-methyl modified nucleotide
tagtggaagaccactccttgt

SEQ ID NO: 958 - RNA, 21 nt, synthetic construct
  source 1..21: mol_type = other RNA
  modified_base 1: mod_base = OTHER; note = 2'-O-methyl modified nucleotide with phosphorothioate linkage
  modified_base 2: mod_base = OTHER; note = 2'-fluoro modified nucleotide with phosphorothioate linkage
  modified_base 3: mod_base = OTHER; note = 2'-O-methyl modified nucleotide
  modified_base 4: mod_base = OTHER; note = 2'-O-methyl modified nucleotide
  modified_base 5: mod_base = OTHER; note = 2'-O-methyl modified nucleotide
  modified_base 6: mod_base = OTHER; note = 2'-fluoro modified nucleotide
  modified_base 7: mod_base = OTHER; note = 2'-O-methyl modified nucleotide
  modified_base 8: mod_base = OTHER; note = 2'-O-methyl modified nucleotide
  modified_base 9: mod_base = OTHER; note = 2'-O-methyl modified nucleotide
  modified_base 10: mod_base = OTHER; note = 2'-O-methyl modified nucleotide
  modified_base 11: mod_base = OTHER; note = 2'-O-methyl modified nucleotide
  modified_base 12: mod_base = OTHER; note = 2'-O-methyl modified nucleotide
  modified_base 13: mod_base = OTHER; note = 2'-O-methyl modified nucleotide
  modified_base 14: mod_base = OTHER; note = 2'-fluoro modified nucleotide
  modified_base 15: mod_base = OTHER; note = 2'-O-methyl modified nucleotide
  modified_base 16: mod_base = OTHER; note = 2'-fluoro modified nucleotide
  modified_base 17: mod_base = OTHER; note = 2'-O-methyl modified nucleotide
  modified_base 18: mod_base = OTHER; note = 2'-O-methyl modified nucleotide
  modified_base 19: mod_base = OTHER; note = 2'-O-methyl modified nucleotide with phosphorothioate linkage
  modified_base 20: mod_base = OTHER; note = 2'-O-methyl modified nucleotide with phosphorothioate linkage
  modified_base 21: mod_base = OTHER; note = 2'-O-methyl modified nucleotide
tggtgtcatggcaaacatgat

SEQ ID NO: 959 - RNA, 21 nt, synthetic construct
  source 1..21: mol_type = other RNA
  modified_base 1: mod_base = OTHER; note = 2'-O-methyl modified nucleotide with phosphorothioate linkage
  modified_base 2: mod_base = OTHER; note = 2'-fluoro modified nucleotide with phosphorothioate linkage
  modified_base 3: mod_base = OTHER; note = 2'-O-methyl modified nucleotide
  modified_base 4: mod_base = OTHER; note = 2'-O-methyl modified nucleotide
  modified_base 5: mod_base = OTHER; note = 2'-O-methyl modified nucleotide
  modified_base 6: mod_base = OTHER; note = 2'-fluoro modified nucleotide
  modified_base 7: mod_base = OTHER; note = 2'-O-methyl modified nucleotide
  modified_base 8: mod_base = OTHER; note = 2'-O-methyl modified nucleotide
  modified_base 9: mod_base = OTHER; note = 2'-O-methyl modified nucleotide
  modified_base 10: mod_base = OTHER; note = 2'-O-methyl modified nucleotide
  modified_base 11: mod_base = OTHER; note = 2'-O-methyl modified nucleotide
  modified_base 12: mod_base = OTHER; note = 2'-O-methyl modified nucleotide
  modified_base 13: mod_base = OTHER; note = 2'-O-methyl modified nucleotide
  modified_base 14: mod_base = OTHER; note = 2'-fluoro modified nucleotide
  modified_base 15: mod_base = OTHER; note = 2'-O-methyl modified nucleotide
  modified_base 16: mod_base = OTHER; note = 2'-fluoro modified nucleotide
  modified_base 17: mod_base = OTHER; note = 2'-O-methyl modified nucleotide
  modified_base 18: mod_base = OTHER; note = 2'-O-methyl modified nucleotide
  modified_base 19: mod_base = OTHER; note = 2'-O-methyl modified nucleotide with phosphorothioate linkage
  modified_base 20: mod_base = OTHER; note = 2'-O-methyl modified nucleotide with phosphorothioate linkage
  modified_base 21: mod_base = OTHER; note = 2'-O-methyl modified nucleotide
ttgatgacatagcgcatgtat

SEQ ID NO: 960 - RNA, 21 nt, synthetic construct
  source 1..21: mol_type = other RNA
  modified_base 1: mod_base = OTHER; note = 2'-O-methyl modified nucleotide with phosphorothioate linkage
  modified_base 2: mod_base = OTHER; note = 2'-fluoro modified nucleotide with phosphorothioate linkage
  modified_base 3: mod_base = OTHER; note = 2'-O-methyl modified nucleotide
  modified_base 4: mod_base = OTHER; note = 2'-O-methyl modified nucleotide
  modified_base 5: mod_base = OTHER; note = 2'-O-methyl modified nucleotide
  modified_base 6: mod_base = OTHER; note = 2'-fluoro modified nucleotide
  modified_base 7: mod_base = OTHER; note = 2'-O-methyl modified nucleotide
  modified_base 8: mod_base = OTHER; note = 2'-O-methyl modified nucleotide
  modified_base 9: mod_base = OTHER; note = 2'-O-methyl modified nucleotide
  modified_base 10: mod_base = OTHER; note = 2'-O-methyl modified nucleotide
  modified_base 11: mod_base = OTHER; note = 2'-O-methyl modified nucleotide
  modified_base 12: mod_base = OTHER; note = 2'-O-methyl modified nucleotide
  modified_base 13: mod_base = OTHER; note = 2'-O-methyl modified nucleotide
  modified_base 14: mod_base = OTHER; note = 2'-fluoro modified nucleotide
  modified_base 15: mod_base = OTHER; note = 2'-O-methyl modified nucleotide
  modified_base 16: mod_base = OTHER; note = 2'-fluoro modified nucleotide
  modified_base 17: mod_base = OTHER; note = 2'-O-methyl modified nucleotide
  modified_base 18: mod_base = OTHER; note = 2'-O-methyl modified nucleotide
  modified_base 19: mod_base = OTHER; note = 2'-O-methyl modified nucleotide with phosphorothioate linkage
  modified_base 20: mod_base = OTHER; note = 2'-O-methyl modified nucleotide with phosphorothioate linkage
  modified_base 21: mod_base = OTHER; note = 2'-O-methyl modified nucleotide
tcgttgtgggcctccatcctc

SEQ ID NO: 961 - RNA, 21 nt, synthetic construct
  source 1..21: mol_type = other RNA
  modified_base 1: mod_base = OTHER; note = 2'-O-methyl modified nucleotide with phosphorothioate linkage
  modified_base 2: mod_base = OTHER; note = 2'-fluoro modified nucleotide with phosphorothioate linkage
  modified_base 3: mod_base = OTHER; note = 2'-O-methyl modified nucleotide
  modified_base 4: mod_base = OTHER; note = 2'-O-methyl modified nucleotide
  modified_base 5: mod_base = OTHER; note = 2'-O-methyl modified nucleotide
  modified_base 6: mod_base = OTHER; note = 2'-fluoro modified nucleotide
  modified_base 7: mod_base = OTHER; note = 2'-O-methyl modified nucleotide
  modified_base 8: mod_base = OTHER; note = 2'-O-methyl modified nucleotide
  modified_base 9: mod_base = OTHER; note = 2'-O-methyl modified nucleotide
  modified_base 10: mod_base = OTHER; note = 2'-O-methyl modified nucleotide
  modified_base 11: mod_base = OTHER; note = 2'-O-methyl modified nucleotide
  modified_base 12: mod_base = OTHER; note = 2'-O-methyl modified nucleotide
  modified_base 13: mod_base = OTHER; note = 2'-O-methyl modified nucleotide
  modified_base 14: mod_base = OTHER; note = 2'-fluoro modified nucleotide
  modified_base 15: mod_base = OTHER; note = 2'-O-methyl modified nucleotide
  modified_base 16: mod_base = OTHER; note = 2'-fluoro modified nucleotide
  modified_base 17: mod_base = OTHER; note = 2'-O-methyl modified nucleotide
  modified_base 18: mod_base = OTHER; note = 2'-O-methyl modified nucleotide
  modified_base 19: mod_base = OTHER; note = 2'-O-methyl modified nucleotide with phosphorothioate linkage
  modified_base 20: mod_base = OTHER; note = 2'-O-methyl modified nucleotide with phosphorothioate linkage
  modified_base 21: mod_base = OTHER; note = 2'-O-methyl modified nucleotide
tatactgtgccaccagggcga

SEQ ID NO: 962 - RNA, 21 nt, synthetic construct
  source 1..21: mol_type = other RNA
  modified_base 1: mod_base = OTHER; note = 2'-O-methyl modified nucleotide with phosphorothioate linkage
  modified_base 2: mod_base = OTHER; note = 2'-fluoro modified nucleotide with phosphorothioate linkage
  modified_base 3: mod_base = OTHER; note = 2'-O-methyl modified nucleotide
  modified_base 4: mod_base = OTHER; note = 2'-O-methyl modified nucleotide
  modified_base 5: mod_base = OTHER; note = 2'-O-methyl modified nucleotide
  modified_base 6: mod_base = OTHER; note = 2'-fluoro modified nucleotide
  modified_base 7: mod_base = OTHER; note = 2'-O-methyl modified nucleotide
  modified_base 8: mod_base = OTHER; note = 2'-O-methyl modified nucleotide
  modified_base 9: mod_base = OTHER; note = 2'-O-methyl modified nucleotide
  modified_base 10: mod_base = OTHER; note = 2'-O-methyl modified nucleotide
  modified_base 11: mod_base = OTHER; note = 2'-O-methyl modified nucleotide
  modified_base 12: mod_base = OTHER; note = 2'-O-methyl modified nucleotide
  modified_base 13: mod_base = OTHER; note = 2'-O-methyl modified nucleotide
  modified_base 14: mod_base = OTHER; note = 2'-fluoro modified nucleotide
  modified_base 15: mod_base = OTHER; note = 2'-O-methyl modified nucleotide
  modified_base 16: mod_base = OTHER; note = 2'-fluoro modified nucleotide
  modified_base 17: mod_base = OTHER; note = 2'-O-methyl modified nucleotide
  modified_base 18: mod_base = OTHER; note = 2'-O-methyl modified nucleotide
  modified_base 19: mod_base = OTHER; note = 2'-O-methyl modified nucleotide with phosphorothioate linkage
  modified_base 20: mod_base = OTHER; note = 2'-O-methyl modified nucleotide with phosphorothioate linkage
  modified_base 21: mod_base = OTHER; note = 2'-O-methyl modified nucleotide
tgatgatcatccctcccttga

SEQ ID NO: 963 - RNA, 21 nt, synthetic construct
  source 1..21: mol_type = other RNA
  modified_base 1: mod_base = OTHER; note = 2'-O-methyl modified nucleotide with phosphorothioate linkage
  modified_base 2: mod_base = OTHER; note = 2'-fluoro modified nucleotide with phosphorothioate linkage
  modified_base 3: mod_base = OTHER; note = 2'-O-methyl modified nucleotide
  modified_base 4: mod_base = OTHER; note = 2'-O-methyl modified nucleotide
  modified_base 5: mod_base = OTHER; note = 2'-O-methyl modified nucleotide
  modified_base 6: mod_base = OTHER; note = 2'-fluoro modified nucleotide
  modified_base 7: mod_base = OTHER; note = 2'-O-methyl modified nucleotide
  modified_base 8: mod_base = OTHER; note = 2'-O-methyl modified nucleotide
  modified_base 9: mod_base = OTHER; note = 2'-O-methyl modified nucleotide
  modified_base 10: mod_base = OTHER; note = 2'-O-methyl modified nucleotide
  modified_base 11: mod_base = OTHER; note = 2'-O-methyl modified nucleotide
  modified_base 12: mod_base = OTHER; note = 2'-O-methyl modified nucleotide
  modified_base 13: mod_base = OTHER; note = 2'-O-methyl modified nucleotide
  modified_base 14: mod_base = OTHER; note = 2'-fluoro modified nucleotide
  modified_base 15: mod_base = OTHER; note = 2'-O-methyl modified nucleotide
  modified_base 16: mod_base = OTHER; note = 2'-fluoro modified nucleotide
  modified_base 17: mod_base = OTHER; note = 2'-O-methyl modified nucleotide
  modified_base 18: mod_base = OTHER; note = 2'-O-methyl modified nucleotide
  modified_base 19: mod_base = OTHER; note = 2'-O-methyl modified nucleotide with phosphorothioate linkage
  modified_base 20: mod_base = OTHER; note = 2'-O-methyl modified nucleotide with phosphorothioate linkage
  modified_base 21: mod_base = OTHER; note = 2'-O-methyl modified nucleotide
tgatagatgtactggaaatgc

SEQ ID NO: 964 - RNA, 21 nt, synthetic construct
  source 1..21: mol_type = other RNA
  modified_base 1: mod_base = OTHER; note = 2'-O-methyl modified nucleotide with phosphorothioate linkage
  modified_base 2: mod_base = OTHER; note = 2'-fluoro modified nucleotide with phosphorothioate linkage
  modified_base 3: mod_base = OTHER; note = 2'-O-methyl modified nucleotide
  modified_base 4: mod_base = OTHER; note = 2'-O-methyl modified nucleotide
  modified_base 5: mod_base = OTHER; note = 2'-O-methyl modified nucleotide
  modified_base 6: mod_base = OTHER; note = 2'-fluoro modified nucleotide
  modified_base 7: mod_base = OTHER; note = 2'-O-methyl modified nucleotide
  modified_base 8: mod_base = OTHER; note = 2'-O-methyl modified nucleotide
  modified_base 9: mod_base = OTHER; note = 2'-O-methyl modified nucleotide
  modified_base 10: mod_base = OTHER; note = 2'-O-methyl modified nucleotide
  modified_base 11: mod_base = OTHER; note = 2'-O-methyl modified nucleotide
  modified_base 12: mod_base = OTHER; note = 2'-O-methyl modified nucleotide
  modified_base 13: mod_base = OTHER; note = 2'-O-methyl modified nucleotide
  modified_base 14: mod_base = OTHER; note = 2'-fluoro modified nucleotide
  modified_base 15: mod_base = OTHER; note = 2'-O-methyl modified nucleotide
  modified_base 16: mod_base = OTHER; note = 2'-fluoro modified nucleotide
  modified_base 17: mod_base = OTHER; note = 2'-O-methyl modified nucleotide
  modified_base 18: mod_base = OTHER; note = 2'-O-methyl modified nucleotide
  modified_base 19: mod_base = OTHER; note = 2'-O-methyl modified nucleotide with phosphorothioate linkage
  modified_base 20: mod_base = OTHER; note = 2'-O-methyl modified nucleotide with phosphorothioate linkage
  modified_base 21: mod_base = OTHER; note = 2'-O-methyl modified nucleotide
tgaatgggatttgggtatttg

SEQ ID NO: 965 - RNA, 21 nt, synthetic construct
  source 1..21: mol_type = other RNA
  modified_base 1: mod_base = OTHER; note = 2'-O-methyl modified nucleotide with phosphorothioate linkage
  modified_base 2: mod_base = OTHER; note = 2'-fluoro modified nucleotide with phosphorothioate linkage
  modified_base 3: mod_base = OTHER; note = 2'-O-methyl modified nucleotide
  modified_base 4: mod_base = OTHER; note = 2'-O-methyl modified nucleotide
  modified_base 5: mod_base = OTHER; note = 2'-O-methyl modified nucleotide
  modified_base 6: mod_base = OTHER; note = 2'-fluoro modified nucleotide
  modified_base 7: mod_base = OTHER; note = 2'-O-methyl modified nucleotide
  modified_base 8: mod_base = OTHER; note = 2'-O-methyl modified nucleotide
  modified_base 9: mod_base = OTHER; note = 2'-O-methyl modified nucleotide
  modified_base 10: mod_base = OTHER; note = 2'-O-methyl modified nucleotide
  modified_base 11: mod_base = OTHER; note = 2'-O-methyl modified nucleotide
  modified_base 12: mod_base = OTHER; note = 2'-O-methyl modified nucleotide
  modified_base 13: mod_base = OTHER; note = 2'-O-methyl modified nucleotide
  modified_base 14: mod_base = OTHER; note = 2'-fluoro modified nucleotide
  modified_base 15: mod_base = OTHER; note = 2'-O-methyl modified nucleotide
  modified_base 16: mod_base = OTHER; note = 2'-fluoro modified nucleotide
  modified_base 17: mod_base = OTHER; note = 2'-O-methyl modified nucleotide
  modified_base 18: mod_base = OTHER; note = 2'-O-methyl modified nucleotide
  modified_base 19: mod_base = OTHER; note = 2'-O-methyl modified nucleotide with phosphorothioate linkage
  modified_base 20: mod_base = OTHER; note = 2'-O-methyl modified nucleotide with phosphorothioate linkage
  modified_base 21: mod_base = OTHER; note = 2'-O-methyl modified nucleotide
tttgaggacgatccctatggt

SEQ ID NO: 966 - RNA, 21 nt, synthetic construct
  source 1..21: mol_type = other RNA
  modified_base 1: mod_base = OTHER; note = 2'-O-methyl modified nucleotide with phosphorothioate linkage
  modified_base 2: mod_base = OTHER; note = 2'-fluoro modified nucleotide with phosphorothioate linkage
  modified_base 3: mod_base = OTHER; note = 2'-O-methyl modified nucleotide
  modified_base 4: mod_base = OTHER; note = 2'-O-methyl modified nucleotide
  modified_base 5: mod_base = OTHER; note = 2'-O-methyl modified nucleotide
  modified_base 6: mod_base = OTHER; note = 2'-fluoro modified nucleotide
  modified_base 7: mod_base = OTHER; note = 2'-O-methyl modified nucleotide
  modified_base 8: mod_base = OTHER; note = 2'-O-methyl modified nucleotide
  modified_base 9: mod_base = OTHER; note = 2'-O-methyl modified nucleotide
  modified_base 10: mod_base = OTHER; note = 2'-O-methyl modified nucleotide
  modified_base 11: mod_base = OTHER; note = 2'-O-methyl modified nucleotide
  modified_base 12: mod_base = OTHER; note = 2'-O-methyl modified nucleotide
  modified_base 13: mod_base = OTHER; note = 2'-O-methyl modified nucleotide
  modified_base 14: mod_base = OTHER; note = 2'-fluoro modified nucleotide
  modified_base 15: mod_base = OTHER; note = 2'-O-methyl modified nucleotide
  modified_base 16: mod_base = OTHER; note = 2'-fluoro modified nucleotide
  modified_base 17: mod_base = OTHER; note = 2'-O-methyl modified nucleotide
  modified_base 18: mod_base = OTHER; note = 2'-O-methyl modified nucleotide
  modified_base 19: mod_base = OTHER; note = 2'-O-methyl modified nucleotide with phosphorothioate linkage
  modified_base 20: mod_base = OTHER; note = 2'-O-methyl modified nucleotide with phosphorothioate linkage
  modified_base 21: mod_base = OTHER; note = 2'-O-methyl modified nucleotide
tccataagtgagccttgatct

SEQ ID NO: 967 - RNA, 21 nt, synthetic construct
  source 1..21: mol_type = other RNA
  modified_base 1: mod_base = OTHER; note = 2'-O-methyl modified nucleotide with phosphorothioate linkage
  modified_base 2: mod_base = OTHER; note = 2'-fluoro modified nucleotide with phosphorothioate linkage
  modified_base 3: mod_base = OTHER; note = 2'-O-methyl modified nucleotide
  modified_base 4: mod_base = OTHER; note = 2'-O-methyl modified nucleotide
  modified_base 5: mod_base = OTHER; note = 2'-O-methyl modified nucleotide
  modified_base 6: mod_base = OTHER; note = 2'-fluoro modified nucleotide
  modified_base 7: mod_base = OTHER; note = 2'-O-methyl modified nucleotide
  modified_base 8: mod_base = OTHER; note = 2'-O-methyl modified nucleotide
  modified_base 9: mod_base = OTHER; note = 2'-O-methyl modified nucleotide
  modified_base 10: mod_base = OTHER; note = 2'-O-methyl modified nucleotide
  modified_base 11: mod_base = OTHER; note = 2'-O-methyl modified nucleotide
  modified_base 12: mod_base = OTHER; note = 2'-O-methyl modified nucleotide
  modified_base 13: mod_base = OTHER; note = 2'-O-methyl modified nucleotide
  modified_base 14: mod_base = OTHER; note = 2'-fluoro modified nucleotide
  modified_base 15: mod_base = OTHER; note = 2'-O-methyl modified nucleotide
  modified_base 16: mod_base = OTHER; note = 2'-fluoro modified nucleotide
  modified_base 17: mod_base = OTHER; note = 2'-O-methyl modified nucleotide
  modified_base 18: mod_base = OTHER; note = 2'-O-methyl modified nucleotide
  modified_base 19: mod_base = OTHER; note = 2'-O-methyl modified nucleotide with phosphorothioate linkage
  modified_base 20: mod_base = OTHER; note = 2'-O-methyl modified nucleotide with phosphorothioate linkage
  modified_base 21: mod_base = OTHER; note = 2'-O-methyl modified nucleotide
tgactgaagacattggacagg

SEQ ID NO: 968 - RNA, 21 nt, synthetic construct
  source 1..21: mol_type = other RNA
  modified_base 1: mod_base = OTHER; note = 2'-O-methyl modified nucleotide with phosphorothioate linkage
  modified_base 2: mod_base = OTHER; note = 2'-fluoro modified nucleotide with phosphorothioate linkage
  modified_base 3: mod_base = OTHER; note = 2'-O-methyl modified nucleotide
  modified_base 4: mod_base = OTHER; note = 2'-O-methyl modified nucleotide
  modified_base 5: mod_base = OTHER; note = 2'-O-methyl modified nucleotide
  modified_base 6: mod_base = OTHER; note = 2'-fluoro modified nucleotide
  modified_base 7: mod_base = OTHER; note = 2'-O-methyl modified nucleotide
  modified_base 8: mod_base = OTHER; note = 2'-O-methyl modified nucleotide
  modified_base 9: mod_base = OTHER; note = 2'-O-methyl modified nucleotide
  modified_base 10: mod_base = OTHER; note = 2'-O-methyl modified nucleotide
  modified_base 11: mod_base = OTHER; note = 2'-O-methyl modified nucleotide
  modified_base 12: mod_base = OTHER; note = 2'-O-methyl modified nucleotide
  modified_base 13: mod_base = OTHER; note = 2'-O-methyl modified nucleotide
  modified_base 14: mod_base = OTHER; note = 2'-fluoro modified nucleotide
  modified_base 15: mod_base = OTHER; note = 2'-O-methyl modified nucleotide
  modified_base 16: mod_base = OTHER; note = 2'-fluoro modified nucleotide
  modified_base 17: mod_base = OTHER; note = 2'-O-methyl modified nucleotide
  modified_base 18: mod_base = OTHER; note = 2'-O-methyl modified nucleotide
  modified_base 19: mod_base = OTHER; note = 2'-O-methyl modified nucleotide with phosphorothioate linkage
  modified_base 20: mod_base = OTHER; note = 2'-O-methyl modified nucleotide with phosphorothioate linkage
  modified_base 21: mod_base = OTHER; note = 2'-O-methyl modified nucleotide
tatagcgcatgtattgtggcc

SEQ ID NO: 969 - RNA, 21 nt, synthetic construct
  source 1..21: mol_type = other RNA
  modified_base 1: mod_base = OTHER; note = 2'-O-methyl modified nucleotide with phosphorothioate linkage
  modified_base 2: mod_base = OTHER; note = 2'-fluoro modified nucleotide with phosphorothioate linkage
  modified_base 3: mod_base = OTHER; note = 2'-O-methyl modified nucleotide
  modified_base 4: mod_base = OTHER; note = 2'-O-methyl modified nucleotide
  modified_base 5: mod_base = OTHER; note = 2'-O-methyl modified nucleotide
  modified_base 6: mod_base = OTHER; note = 2'-fluoro modified nucleotide
  modified_base 7: mod_base = OTHER; note = 2'-O-methyl modified nucleotide
  modified_base 8: mod_base = OTHER; note = 2'-O-methyl modified nucleotide
  modified_base 9: mod_base = OTHER; note = 2'-O-methyl modified nucleotide
  modified_base 10: mod_base = OTHER; note = 2'-O-methyl modified nucleotide
  modified_base 11: mod_base = OTHER; note = 2'-O-methyl modified nucleotide
  modified_base 12: mod_base = OTHER; note = 2'-O-methyl modified nucleotide
  modified_base 13: mod_base = OTHER; note = 2'-O-methyl modified nucleotide
  modified_base 14: mod_base = OTHER; note = 2'-fluoro modified nucleotide
  modified_base 15: mod_base = OTHER; note = 2'-O-methyl modified nucleotide
  modified_base 16: mod_base = OTHER; note = 2'-fluoro modified nucleotide
  modified_base 17: mod_base = OTHER; note = 2'-O-methyl modified nucleotide
  modified_base 18: mod_base = OTHER; note = 2'-O-methyl modified nucleotide
  modified_base 19: mod_base = OTHER; note = 2'-O-methyl modified nucleotide with phosphorothioate linkage
  modified_base 20: mod_base = OTHER; note = 2'-O-methyl modified nucleotide with phosphorothioate linkage
  modified_base 21: mod_base = OTHER; note = 2'-O-methyl modified nucleotide
tatttgaggacgatccctatg

SEQ ID NO: 970 - RNA, 21 nt, synthetic construct
  source 1..21: mol_type = other RNA
  modified_base 1: mod_base = OTHER; note = 2'-O-methyl modified nucleotide with phosphorothioate linkage
  modified_base 2: mod_base = OTHER; note = 2'-fluoro modified nucleotide with phosphorothioate linkage
  modified_base 3: mod_base = OTHER; note = 2'-O-methyl modified nucleotide
  modified_base 4: mod_base = OTHER; note = 2'-O-methyl modified nucleotide
  modified_base 5: mod_base = OTHER; note = 2'-O-methyl modified nucleotide
  modified_base 6: mod_base = OTHER; note = 2'-fluoro modified nucleotide
  modified_base 7: mod_base = OTHER; note = 2'-O-methyl modified nucleotide
  modified_base 8: mod_base = OTHER; note = 2'-O-methyl modified nucleotide
  modified_base 9: mod_base = OTHER; note = 2'-O-methyl modified nucleotide
  modified_base 10: mod_base = OTHER; note = 2'-O-methyl modified nucleotide
  modified_base 11: mod_base = OTHER; note = 2'-O-methyl modified nucleotide
  modified_base 12: mod_base = OTHER; note = 2'-O-methyl modified nucleotide
  modified_base 13: mod_base = OTHER; note = 2'-O-methyl modified nucleotide
  modified_base 14: mod_base = OTHER; note = 2'-fluoro modified nucleotide
  modified_base 15: mod_base = OTHER; note = 2'-O-methyl modified nucleotide
  modified_base 16: mod_base = OTHER; note = 2'-fluoro modified nucleotide
  modified_base 17: mod_base = OTHER; note = 2'-O-methyl modified nucleotide
  modified_base 18: mod_base = OTHER; note = 2'-O-methyl modified nucleotide
  modified_base 19: mod_base = OTHER; note = 2'-O-methyl modified nucleotide with phosphorothioate linkage
  modified_base 20: mod_base = OTHER; note = 2'-O-methyl modified nucleotide with phosphorothioate linkage
  modified_base 21: mod_base = OTHER; note = 2'-O-methyl modified nucleotide
tttttatccttgggagtcttg

SEQ ID NO: 971 - RNA, 21 nt, synthetic construct
  source 1..21: mol_type = other RNA
  modified_base 1: mod_base = OTHER; note = 2'-O-methyl modified nucleotide with phosphorothioate linkage
  modified_base 2: mod_base = OTHER; note = 2'-fluoro modified nucleotide with phosphorothioate linkage
  modified_base 3: mod_base = OTHER; note = 2'-O-methyl modified nucleotide
  modified_base 4: mod_base = OTHER; note = 2'-O-methyl modified nucleotide
  modified_base 5: mod_base = OTHER; note = 2'-O-methyl modified nucleotide
  modified_base 6: mod_base = OTHER; note = 2'-fluoro modified nucleotide
  modified_base 7: mod_base = OTHER; note = 2'-O-methyl modified nucleotide
  modified_base 8: mod_base = OTHER; note = 2'-O-methyl modified nucleotide
  modified_base 9: mod_base = OTHER; note = 2'-O-methyl modified nucleotide
  modified_base 10: mod_base = OTHER; note = 2'-O-methyl modified nucleotide
  modified_base 11: mod_base = OTHER; note = 2'-O-methyl modified nucleotide
  modified_base 12: mod_base = OTHER; note = 2'-O-methyl modified nucleotide
  modified_base 13: mod_base = OTHER; note = 2'-O-methyl modified nucleotide
  modified_base 14: mod_base = OTHER; note = 2'-fluoro modified nucleotide
  modified_base 15: mod_base = OTHER; note = 2'-O-methyl modified nucleotide
  modified_base 16: mod_base = OTHER; note = 2'-fluoro modified nucleotide
  modified_base 17: mod_base = OTHER; note = 2'-O-methyl modified nucleotide
  modified_base 18: mod_base = OTHER; note = 2'-O-methyl modified nucleotide
  modified_base 19: mod_base = OTHER; note = 2'-O-methyl modified nucleotide with phosphorothioate linkage
  modified_base 20: mod_base = OTHER; note = 2'-O-methyl modified nucleotide with phosphorothioate linkage
  modified_base 21: mod_base = OTHER; note = 2'-O-methyl modified nucleotide
tttcatggccagactgaagac

SEQ ID NO: 972 - RNA, 21 nt, synthetic construct
  source 1..21: mol_type = other RNA
  modified_base 1: mod_base = OTHER; note = 2'-O-methyl modified nucleotide with phosphorothioate linkage
  modified_base 2: mod_base = OTHER; note = 2'-fluoro modified nucleotide with phosphorothioate linkage
  modified_base 3: mod_base = OTHER; note = 2'-O-methyl modified nucleotide
  modified_base 4: mod_base = OTHER; note = 2'-O-methyl modified nucleotide
  modified_base 5: mod_base = OTHER; note = 2'-O-methyl modified nucleotide
  modified_base 6: mod_base = OTHER; note = 2'-fluoro modified nucleotide
  modified_base 7: mod_base = OTHER; note = 2'-O-methyl modified nucleotide
  modified_base 8: mod_base = OTHER; note = 2'-O-methyl modified nucleotide
  modified_base 9: mod_base = OTHER; note = 2'-O-methyl modified nucleotide
  modified_base 10: mod_base = OTHER; note = 2'-O-methyl modified nucleotide
  modified_base 11: mod_base = OTHER; note = 2'-O-methyl modified nucleotide
  modified_base 12: mod_base = OTHER; note = 2'-O-methyl modified nucleotide
  modified_base 13: mod_base = OTHER; note = 2'-O-methyl modified nucleotide
  modified_base 14: mod_base = OTHER; note = 2'-fluoro modified nucleotide
  modified_base 15: mod_base = OTHER; note = 2'-O-methyl modified nucleotide
  modified_base 16: mod_base = OTHER; note = 2'-fluoro modified nucleotide
  modified_base 17: mod_base = OTHER; note = 2'-O-methyl modified nucleotide
  modified_base 18: mod_base = OTHER; note = 2'-O-methyl modified nucleotide
  modified_base 19: mod_base = OTHER; note = 2'-O-methyl modified nucleotide with phosphorothioate linkage
  modified_base 20: mod_base = OTHER; note = 2'-O-methyl modified nucleotide with phosphorothioate linkage
  modified_base 21: mod_base = OTHER; note = 2'-O-methyl modified nucleotide
tgttgtgggcctccatcctcc

SEQ ID NO: 973 - RNA, 21 nt, synthetic construct
  source 1..21: mol_type = other RNA
  modified_base 1: mod_base = OTHER; note = 2'-O-methyl modified nucleotide with phosphorothioate linkage
  modified_base 2: mod_base = OTHER; note = 2'-fluoro modified nucleotide with phosphorothioate linkage
  modified_base 3: mod_base = OTHER; note = 2'-O-methyl modified nucleotide
  modified_base 4: mod_base = OTHER; note = 2'-O-methyl modified nucleotide
  modified_base 5: mod_base = OTHER; note = 2'-O-methyl modified nucleotide
  modified_base 6: mod_base = OTHER; note = 2'-fluoro modified nucleotide
  modified_base 7: mod_base = OTHER; note = 2'-O-methyl modified nucleotide
  modified_base 8: mod_base = OTHER; note = 2'-O-methyl modified nucleotide
  modified_base 9: mod_base = OTHER; note = 2'-O-methyl modified nucleotide
  modified_base 10: mod_base = OTHER; note = 2'-O-methyl modified nucleotide
  modified_base 11: mod_base = OTHER; note = 2'-O-methyl modified nucleotide
  modified_base 12: mod_base = OTHER; note = 2'-O-methyl modified nucleotide
  modified_base 13: mod_base = OTHER; note = 2'-O-methyl modified nucleotide
  modified_base 14: mod_base = OTHER; note = 2'-fluoro modified nucleotide
  modified_base 15: mod_base = OTHER; note = 2'-O-methyl modified nucleotide
  modified_base 16: mod_base = OTHER; note = 2'-fluoro modified nucleotide
  modified_base 17: mod_base = OTHER; note = 2'-O-methyl modified nucleotide
  modified_base 18: mod_base = OTHER; note = 2'-O-methyl modified nucleotide
  modified_base 19: mod_base = OTHER; note = 2'-O-methyl modified nucleotide with phosphorothioate linkage
  modified_base 20: mod_base = OTHER; note = 2'-O-methyl modified nucleotide with phosphorothioate linkage
  modified_base 21: mod_base = OTHER; note = 2'-O-methyl modified nucleotide
ttagttcaggaattgagtgac

SEQ ID NO: 974 - RNA, 21 nt, synthetic construct
  source 1..21: mol_type = other RNA
  modified_base 1: mod_base = OTHER; note = 2'-O-methyl modified nucleotide with phosphorothioate linkage
  modified_base 2: mod_base = OTHER; note = 2'-fluoro modified nucleotide with phosphorothioate linkage
  modified_base 3: mod_base = OTHER; note = 2'-O-methyl modified nucleotide
  modified_base 4: mod_base = OTHER; note = 2'-O-methyl modified nucleotide
  modified_base 5: mod_base = OTHER; note = 2'-O-methyl modified nucleotide
  modified_base 6: mod_base = OTHER; note = 2'-fluoro modified nucleotide
  modified_base 7: mod_base = OTHER; note = 2'-O-methyl modified nucleotide
  modified_base 8: mod_base = OTHER; note = 2'-O-methyl modified nucleotide
  modified_base 9: mod_base = OTHER; note = 2'-O-methyl modified nucleotide
  modified_base 10: mod_base = OTHER; note = 2'-O-methyl modified nucleotide
  modified_base 11: mod_base = OTHER; note = 2'-O-methyl modified nucleotide
  modified_base 12: mod_base = OTHER; note = 2'-O-methyl modified nucleotide
  modified_base 13: mod_base = OTHER; note = 2'-O-methyl modified nucleotide
  modified_base 14: mod_base = OTHER; note = 2'-fluoro modified nucleotide
  modified_base 15: mod_base = OTHER; note = 2'-O-methyl modified nucleotide
  modified_base 16: mod_base = OTHER; note = 2'-fluoro modified nucleotide
  modified_base 17: mod_base = OTHER; note = 2'-O-methyl modified nucleotide
  modified_base 18: mod_base = OTHER; note = 2'-O-methyl modified nucleotide
  modified_base 19: mod_base = OTHER; note = 2'-O-methyl modified nucleotide with phosphorothioate linkage
  modified_base 20: mod_base = OTHER; note = 2'-O-methyl modified nucleotide with phosphorothioate linkage
  modified_base 21: mod_base = OTHER; note = 2'-O-methyl modified nucleotide
tggtgcaaggaatgagaacca

SEQ ID NO: 975 - RNA, 21 nt, synthetic construct
  source 1..21: mol_type = other RNA
  modified_base 1: mod_base = OTHER; note = 2'-O-methyl modified nucleotide with phosphorothioate linkage
  modified_base 2: mod_base = OTHER; note = 2'-fluoro modified nucleotide with phosphorothioate linkage
  modified_base 3: mod_base = OTHER; note = 2'-O-methyl modified nucleotide
  modified_base 4: mod_base = OTHER; note = 2'-O-methyl modified nucleotide
  modified_base 5: mod_base = OTHER; note = 2'-O-methyl modified nucleotide
  modified_base 6: mod_base = OTHER; note = 2'-fluoro modified nucleotide
  modified_base 7: mod_base = OTHER; note = 2'-O-methyl modified nucleotide
  modified_base 8: mod_base = OTHER; note = 2'-O-methyl modified nucleotide
  modified_base 9: mod_base = OTHER; note = 2'-O-methyl modified nucleotide
  modified_base 10: mod_base = OTHER; note = 2'-O-methyl modified nucleotide
  modified_base 11: mod_base = OTHER; note = 2'-O-methyl modified nucleotide
  modified_base 12: mod_base = OTHER; note = 2'-O-methyl modified nucleotide
  modified_base 13: mod_base = OTHER; note = 2'-O-methyl modified nucleotide
  modified_base 14: mod_base = OTHER; note = 2'-fluoro modified nucleotide
  modified_base 15: mod_base = OTHER; note = 2'-O-methyl modified nucleotide
  modified_base 16: mod_base = OTHER; note = 2'-fluoro modified nucleotide
  modified_base 17: mod_base = OTHER; note = 2'-O-methyl modified nucleotide
  modified_base 18: mod_base = OTHER; note = 2'-O-methyl modified nucleotide
  modified_base 19: mod_base = OTHER; note = 2'-O-methyl modified nucleotide with phosphorothioate linkage
  modified_base 20: mod_base = OTHER; note = 2'-O-methyl modified nucleotide with phosphorothioate linkage
  modified_base 21: mod_base = OTHER; note = 2'-O-methyl modified nucleotide
tgcctttatagggcaccttgt

SEQ ID NO: 976 - RNA, 21 nt, synthetic construct
  source 1..21: mol_type = other RNA
  modified_base 1: mod_base = OTHER; note = 2'-O-methyl modified nucleotide with phosphorothioate linkage
  modified_base 2: mod_base = OTHER; note = 2'-fluoro modified nucleotide with phosphorothioate linkage
  modified_base 3: mod_base = OTHER; note = 2'-O-methyl modified nucleotide
  modified_base 4: mod_base = OTHER; note = 2'-O-methyl modified nucleotide
  modified_base 5: mod_base = OTHER; note = 2'-O-methyl modified nucleotide
  modified_base 6: mod_base = OTHER; note = 2'-fluoro modified nucleotide
  modified_base 7: mod_base = OTHER; note = 2'-O-methyl modified nucleotide
  modified_base 8: mod_base = OTHER; note = 2'-O-methyl modified nucleotide
  modified_base 9: mod_base = OTHER; note = 2'-O-methyl modified nucleotide
  modified_base 10: mod_base = OTHER; note = 2'-O-methyl modified nucleotide
  modified_base 11: mod_base = OTHER; note = 2'-O-methyl modified nucleotide
  modified_base 12: mod_base = OTHER; note = 2'-O-methyl modified nucleotide
  modified_base 13: mod_base = OTHER; note = 2'-O-methyl modified nucleotide
  modified_base 14: mod_base = OTHER; note = 2'-fluoro modified nucleotide
  modified_base 15: mod_base = OTHER; note = 2'-O-methyl modified nucleotide
  modified_base 16: mod_base = OTHER; note = 2'-fluoro modified nucleotide
  modified_base 17: mod_base = OTHER; note = 2'-O-methyl modified nucleotide
  modified_base 18: mod_base = OTHER; note = 2'-O-methyl modified nucleotide
  modified_base 19: mod_base = OTHER; note = 2'-O-methyl modified nucleotide with phosphorothioate linkage
  modified_base 20: mod_base = OTHER; note = 2'-O-methyl modified nucleotide with phosphorothioate linkage
  modified_base 21: mod_base = OTHER; note = 2'-O-methyl modified nucleotide
tgtgtagatcatttttgtttt

SEQ ID NO: 977 - RNA, 21 nt, synthetic construct
  source 1..21: mol_type = other RNA
  modified_base 1: mod_base = OTHER; note = 2'-O-methyl modified nucleotide with phosphorothioate linkage
  modified_base 2: mod_base = OTHER; note = 2'-fluoro modified nucleotide with phosphorothioate linkage
  modified_base 3: mod_base = OTHER; note = 2'-O-methyl modified nucleotide
  modified_base 4: mod_base = OTHER; note = 2'-O-methyl modified nucleotide
  modified_base 5: mod_base = OTHER; note = 2'-O-methyl modified nucleotide
  modified_base 6: mod_base = OTHER; note = 2'-fluoro modified nucleotide
  modified_base 7: mod_base = OTHER; note = 2'-O-methyl modified nucleotide
  modified_base 8: mod_base = OTHER; note = 2'-O-methyl modified nucleotide
  modified_base 9: mod_base = OTHER; note = 2'-O-methyl modified nucleotide
  modified_base 10: mod_base = OTHER; note = 2'-O-methyl modified nucleotide
  modified_base 11: mod_base = OTHER; note = 2'-O-methyl modified nucleotide
  modified_base 12: mod_base = OTHER; note = 2'-O-methyl modified nucleotide
  modified_base 13: mod_base = OTHER; note = 2'-O-methyl modified nucleotide
  modified_base 14: mod_base = OTHER; note = 2'-fluoro modified nucleotide
  modified_base 15: mod_base = OTHER; note = 2'-O-methyl modified nucleotide
  modified_base 16: mod_base = OTHER; note = 2'-fluoro modified nucleotide
  modified_base 17: mod_base = OTHER; note = 2'-O-methyl modified nucleotide
  modified_base 18: mod_base = OTHER; note = 2'-O-methyl modified nucleotide
  modified_base 19: mod_base = OTHER; note = 2'-O-methyl modified nucleotide with phosphorothioate linkage
  modified_base 20: mod_base = OTHER; note = 2'-O-methyl modified nucleotide with phosphorothioate linkage
  modified_base 21: mod_base = OTHER; note = 2'-O-methyl modified nucleotide
tccaaagttgggtggcagggt

SEQ ID NO: 978 - RNA, 21 nt, synthetic construct
  source 1..21: mol_type = other RNA
  modified_base 1: mod_base = OTHER; note = 2'-O-methyl modified nucleotide with phosphorothioate linkage
  modified_base 2: mod_base = OTHER; note = 2'-fluoro modified nucleotide with phosphorothioate linkage
  modified_base 3: mod_base = OTHER; note = 2'-O-methyl modified nucleotide
  modified_base 4: mod_base = OTHER; note = 2'-O-methyl modified nucleotide
  modified_base 5: mod_base = OTHER; note = 2'-O-methyl modified nucleotide
  modified_base 6: mod_base = OTHER; note = 2'-fluoro modified nucleotide
  modified_base 7: mod_base = OTHER; note = 2'-O-methyl modified nucleotide
  modified_base 8: mod_base = OTHER; note = 2'-O-methyl modified nucleotide
  modified_base 9: mod_base = OTHER; note = 2'-O-methyl modified nucleotide
  modified_base 10: mod_base = OTHER; note = 2'-O-methyl modified nucleotide
  modified_base 11: mod_base = OTHER; note = 2'-O-methyl modified nucleotide
  modified_base 12: mod_base = OTHER; note = 2'-O-methyl modified nucleotide
  modified_base 13: mod_base = OTHER; note = 2'-O-methyl modified nucleotide
  modified_base 14: mod_base = OTHER; note = 2'-fluoro modified nucleotide
  modified_base 15: mod_base = OTHER; note = 2'-O-methyl modified nucleotide
  modified_base 16: mod_base = OTHER; note = 2'-fluoro modified nucleotide
  modified_base 17: mod_base = OTHER; note = 2'-O-methyl modified nucleotide
  modified_base 18: mod_base = OTHER; note = 2'-O-methyl modified nucleotide
  modified_base 19: mod_base = OTHER; note = 2'-O-methyl modified nucleotide with phosphorothioate linkage
  modified_base 20: mod_base = OTHER; note = 2'-O-methyl modified nucleotide with phosphorothioate linkage
  modified_base 21: mod_base = OTHER; note = 2'-O-methyl modified nucleotide
ttgtgacggccacactgcaca

SEQ ID NO: 979 - RNA, 21 nt, synthetic construct
  source 1..21: mol_type = other RNA
  modified_base 1: mod_base = OTHER; note = 2'-O-methyl modified nucleotide with phosphorothioate linkage
  modified_base 2: mod_base = OTHER; note = 2'-fluoro modified nucleotide with phosphorothioate linkage
  modified_base 3: mod_base = OTHER; note = 2'-O-methyl modified nucleotide
  modified_base 4: mod_base = OTHER; note = 2'-O-methyl modified nucleotide
  modified_base 5: mod_base = OTHER; note = 2'-O-methyl modified nucleotide
  modified_base 6: mod_base = OTHER; note = 2'-fluoro modified nucleotide
  modified_base 7: mod_base = OTHER; note = 2'-O-methyl modified nucleotide
  modified_base 8: mod_base = OTHER; note = 2'-O-methyl modified nucleotide
  modified_base 9: mod_base = OTHER; note = 2'-O-methyl modified nucleotide
  modified_base 10: mod_base = OTHER; note = 2'-O-methyl modified nucleotide
  modified_base 11: mod_base = OTHER; note = 2'-O-methyl modified nucleotide
  modified_base 12: mod_base = OTHER; note = 2'-O-methyl modified nucleotide
  modified_base 13: mod_base = OTHER; note = 2'-O-methyl modified nucleotide
  modified_base 14: mod_base = OTHER; note = 2'-fluoro modified nucleotide
  modified_base 15: mod_base = OTHER; note = 2'-O-methyl modified nucleotide
  modified_base 16: mod_base = OTHER; note = 2'-fluoro modified nucleotide
  modified_base 17: mod_base = OTHER; note = 2'-O-methyl modified nucleotide
  modified_base 18: mod_base = OTHER; note = 2'-O-methyl modified nucleotide
  modified_base 19: mod_base = OTHER; note = 2'-O-methyl modified nucleotide with phosphorothioate linkage
  modified_base 20: mod_base = OTHER; note = 2'-O-methyl modified nucleotide with phosphorothioate linkage
  modified_base 21: mod_base = OTHER; note = 2'-O-methyl modified nucleotide
tgatcatccctcccttgatga

SEQ ID NO: 980 - RNA, 21 nt, synthetic construct
  source 1..21: mol_type = other RNA
  modified_base 1: mod_base = OTHER; note = 2'-O-methyl modified nucleotide with phosphorothioate linkage
  modified_base 2: mod_base = OTHER; note = 2'-fluoro modified nucleotide with phosphorothioate linkage
  modified_base 3: mod_base = OTHER; note = 2'-O-methyl modified nucleotide
  modified_base 4: mod_base = OTHER; note = 2'-O-methyl modified nucleotide
  modified_base 5: mod_base = OTHER; note = 2'-O-methyl modified nucleotide
  modified_base 6: mod_base = OTHER; note = 2'-fluoro modified nucleotide
  modified_base 7: mod_base = OTHER; note = 2'-O-methyl modified nucleotide
  modified_base 8: mod_base = OTHER; note = 2'-O-methyl modified nucleotide
  modified_base 9: mod_base = OTHER; note = 2'-O-methyl modified nucleotide
  modified_base 10: mod_base = OTHER; note = 2'-O-methyl modified nucleotide
  modified_base 11: mod_base = OTHER; note = 2'-O-methyl modified nucleotide
  modified_base 12: mod_base = OTHER; note = 2'-O-methyl modified nucleotide
  modified_base 13: mod_base = OTHER; note = 2'-O-methyl modified nucleotide
  modified_base 14: mod_base = OTHER; note = 2'-fluoro modified nucleotide
  modified_base 15: mod_base = OTHER; note = 2'-O-methyl modified nucleotide
  modified_base 16: mod_base = OTHER; note = 2'-fluoro modified nucleotide
  modified_base 17: mod_base = OTHER; note = 2'-O-methyl modified nucleotide
  modified_base 18: mod_base = OTHER; note = 2'-O-methyl modified nucleotide
  modified_base 19: mod_base = OTHER; note = 2'-O-methyl modified nucleotide with phosphorothioate linkage
  modified_base 20: mod_base = OTHER; note = 2'-O-methyl modified nucleotide with phosphorothioate linkage
  modified_base 21: mod_base = OTHER; note = 2'-O-methyl modified nucleotide
ttattgtggccgtttggattt

SEQ ID NO: 981 - RNA, 21 nt, synthetic construct
  source 1..21: mol_type = other RNA
  modified_base 1: mod_base = OTHER; note = 2'-O-methyl modified nucleotide with phosphorothioate linkage
  modified_base 2: mod_base = OTHER; note = 2'-fluoro modified nucleotide with phosphorothioate linkage
  modified_base 3: mod_base = OTHER; note = 2'-O-methyl modified nucleotide
  modified_base 4: mod_base = OTHER; note = 2'-O-methyl modified nucleotide
  modified_base 5: mod_base = OTHER; note = 2'-O-methyl modified nucleotide
  modified_base 6: mod_base = OTHER; note = 2'-fluoro modified nucleotide
  modified_base 7: mod_base = OTHER; note = 2'-O-methyl modified nucleotide
  modified_base 8: mod_base = OTHER; note = 2'-O-methyl modified nucleotide
  modified_base 9: mod_base = OTHER; note = 2'-O-methyl modified nucleotide
  modified_base 10: mod_base = OTHER; note = 2'-O-methyl modified nucleotide
  modified_base 11: mod_base = OTHER; note = 2'-O-methyl modified nucleotide
  modified_base 12: mod_base = OTHER; note = 2'-O-methyl modified nucleotide
  modified_base 13: mod_base = OTHER; note = 2'-O-methyl modified nucleotide
  modified_base 14: mod_base = OTHER; note = 2'-fluoro modified nucleotide
  modified_base 15: mod_base = OTHER; note = 2'-O-methyl modified nucleotide
  modified_base 16: mod_base = OTHER; note = 2'-fluoro modified nucleotide
  modified_base 17: mod_base = OTHER; note = 2'-O-methyl modified nucleotide
  modified_base 18: mod_base = OTHER; note = 2'-O-methyl modified nucleotide
  modified_base 19: mod_base = OTHER; note = 2'-O-methyl modified nucleotide with phosphorothioate linkage
  modified_base 20: mod_base = OTHER; note = 2'-O-methyl modified nucleotide with phosphorothioate linkage
  modified_base 21: mod_base = OTHER; note = 2'-O-methyl modified nucleotide
tactgtgacggccacactgca

SEQ ID NO: 982 - RNA, 21 nt, synthetic construct
  source 1..21: mol_type = other RNA
  modified_base 1: mod_base = OTHER; note = 2'-O-methyl modified nucleotide with phosphorothioate linkage
  modified_base 2: mod_base = OTHER; note = 2'-fluoro modified nucleotide with phosphorothioate linkage
  modified_base 3: mod_base = OTHER; note = 2'-O-methyl modified nucleotide
  modified_base 4: mod_base = OTHER; note = 2'-O-methyl modified nucleotide
  modified_base 5: mod_base = OTHER; note = 2'-O-methyl modified nucleotide
  modified_base 6: mod_base = OTHER; note = 2'-fluoro modified nucleotide
  modified_base 7: mod_base = OTHER; note = 2'-O-methyl modified nucleotide
  modified_base 8: mod_base = OTHER; note = 2'-O-methyl modified nucleotide
  modified_base 9: mod_base = OTHER; note = 2'-O-methyl modified nucleotide
  modified_base 10: mod_base = OTHER; note = 2'-O-methyl modified nucleotide
  modified_base 11: mod_base = OTHER; note = 2'-O-methyl modified nucleotide
  modified_base 12: mod_base = OTHER; note = 2'-O-methyl modified nucleotide
  modified_base 13: mod_base = OTHER; note = 2'-O-methyl modified nucleotide
  modified_base 14: mod_base = OTHER; note = 2'-fluoro modified nucleotide
  modified_base 15: mod_base = OTHER; note = 2'-O-methyl modified nucleotide
  modified_base 16: mod_base = OTHER; note = 2'-fluoro modified nucleotide
  modified_base 17: mod_base = OTHER; note = 2'-O-methyl modified nucleotide
  modified_base 18: mod_base = OTHER; note = 2'-O-methyl modified nucleotide
  modified_base 19: mod_base = OTHER; note = 2'-O-methyl modified nucleotide with phosphorothioate linkage
  modified_base 20: mod_base = OTHER; note = 2'-O-methyl modified nucleotide with phosphorothioate linkage
  modified_base 21: mod_base = OTHER; note = 2'-O-methyl modified nucleotide
taggtctgtggggcgcttgcc

SEQ ID NO: 983 - RNA, 21 nt, synthetic construct
  source 1..21: mol_type = other RNA
  modified_base 1: mod_base = OTHER; note = 2'-O-methyl modified nucleotide with phosphorothioate linkage
  modified_base 2: mod_base = OTHER; note = 2'-fluoro modified nucleotide with phosphorothioate linkage
  modified_base 3: mod_base = OTHER; note = 2'-O-methyl modified nucleotide
  modified_base 4: mod_base = OTHER; note = 2'-O-methyl modified nucleotide
  modified_base 5: mod_base = OTHER; note = 2'-O-methyl modified nucleotide
  modified_base 6: mod_base = OTHER; note = 2'-fluoro modified nucleotide
  modified_base 7: mod_base = OTHER; note = 2'-O-methyl modified nucleotide
  modified_base 8: mod_base = OTHER; note = 2'-O-methyl modified nucleotide
  modified_base 9: mod_base = OTHER; note = 2'-O-methyl modified nucleotide
  modified_base 10: mod_base = OTHER; note = 2'-O-methyl modified nucleotide
  modified_base 11: mod_base = OTHER; note = 2'-O-methyl modified nucleotide
  modified_base 12: mod_base = OTHER; note = 2'-O-methyl modified nucleotide
  modified_base 13: mod_base = OTHER; note = 2'-O-methyl modified nucleotide
  modified_base 14: mod_base = OTHER; note = 2'-fluoro modified nucleotide
  modified_base 15: mod_base = OTHER; note = 2'-O-methyl modified nucleotide
  modified_base 16: mod_base = OTHER; note = 2'-fluoro modified nucleotide
  modified_base 17: mod_base = OTHER; note = 2'-O-methyl modified nucleotide
  modified_base 18: mod_base = OTHER; note = 2'-O-methyl modified nucleotide
  modified_base 19: mod_base = OTHER; note = 2'-O-methyl modified nucleotide with phosphorothioate linkage
  modified_base 20: mod_base = OTHER; note = 2'-O-methyl modified nucleotide with phosphorothioate linkage
  modified_base 21: mod_base = OTHER; note = 2'-O-methyl modified nucleotide
ttaggcttccataagtgagcc

SEQ ID NO: 984 - RNA, 21 nt, synthetic construct
  source 1..21: mol_type = other RNA
  modified_base 1: mod_base = OTHER; note = 2'-O-methyl modified nucleotide with phosphorothioate linkage
  modified_base 2: mod_base = OTHER; note = 2'-fluoro modified nucleotide with phosphorothioate linkage
  modified_base 3: mod_base = OTHER; note = 2'-O-methyl modified nucleotide
  modified_base 4: mod_base = OTHER; note = 2'-O-methyl modified nucleotide
  modified_base 5: mod_base = OTHER; note = 2'-O-methyl modified nucleotide
  modified_base 6: mod_base = OTHER; note = 2'-fluoro modified nucleotide
  modified_base 7: mod_base = OTHER; note = 2'-O-methyl modified nucleotide
  modified_base 8: mod_base = OTHER; note = 2'-O-methyl modified nucleotide
  modified_base 9: mod_base = OTHER; note = 2'-O-methyl modified nucleotide
  modified_base 10: mod_base = OTHER; note = 2'-O-methyl modified nucleotide
  modified_base 11: mod_base = OTHER; note = 2'-O-methyl modified nucleotide
  modified_base 12: mod_base = OTHER; note = 2'-O-methyl modified nucleotide
  modified_base 13: mod_base = OTHER; note = 2'-O-methyl modified nucleotide
  modified_base 14: mod_base = OTHER; note = 2'-fluoro modified nucleotide
  modified_base 15: mod_base = OTHER; note = 2'-O-methyl modified nucleotide
  modified_base 16: mod_base = OTHER; note = 2'-fluoro modified nucleotide
  modified_base 17: mod_base = OTHER; note = 2'-O-methyl modified nucleotide
  modified_base 18: mod_base = OTHER; note = 2'-O-methyl modified nucleotide
  modified_base 19: mod_base = OTHER; note = 2'-O-methyl modified nucleotide with phosphorothioate linkage
  modified_base 20: mod_base = OTHER; note = 2'-O-methyl modified nucleotide with phosphorothioate linkage
  modified_base 21: mod_base = OTHER; note = 2'-O-methyl modified nucleotide
tatagggcaccttgtccttca

SEQ ID NO: 985 - RNA, 21 nt, synthetic construct
  source 1..21: mol_type = other RNA
  modified_base 1: mod_base = OTHER; note = 2'-O-methyl modified nucleotide with phosphorothioate linkage
  modified_base 2: mod_base = OTHER; note = 2'-fluoro modified nucleotide with phosphorothioate linkage
  modified_base 3: mod_base = OTHER; note = 2'-O-methyl modified nucleotide
  modified_base 4: mod_base = OTHER; note = 2'-O-methyl modified nucleotide
  modified_base 5: mod_base = OTHER; note = 2'-O-methyl modified nucleotide
  modified_base 6: mod_base = OTHER; note = 2'-fluoro modified nucleotide
  modified_base 7: mod_base = OTHER; note = 2'-O-methyl modified nucleotide
  modified_base 8: mod_base = OTHER; note = 2'-O-methyl modified nucleotide
  modified_base 9: mod_base = OTHER; note = 2'-O-methyl modified nucleotide
  modified_base 10: mod_base = OTHER; note = 2'-O-methyl modified nucleotide
  modified_base 11: mod_base = OTHER; note = 2'-O-methyl modified nucleotide
  modified_base 12: mod_base = OTHER; note = 2'-O-methyl modified nucleotide
  modified_base 13: mod_base = OTHER; note = 2'-O-methyl modified nucleotide
  modified_base 14: mod_base = OTHER; note = 2'-fluoro modified nucleotide
  modified_base 15: mod_base = OTHER; note = 2'-O-methyl modified nucleotide
  modified_base 16: mod_base = OTHER; note = 2'-fluoro modified nucleotide
  modified_base 17: mod_base = OTHER; note = 2'-O-methyl modified nucleotide
  modified_base 18: mod_base = OTHER; note = 2'-O-methyl modified nucleotide
  modified_base 19: mod_base = OTHER; note = 2'-O-methyl modified nucleotide with phosphorothioate linkage
  modified_base 20: mod_base = OTHER; note = 2'-O-methyl modified nucleotide with phosphorothioate linkage
  modified_base 21: mod_base = OTHER; note = 2'-O-methyl modified nucleotide
tagatgtactggaaatgctgg

SEQ ID NO: 986 - RNA, 21 nt, synthetic construct
  source 1..21: mol_type = other RNA
  modified_base 1: mod_base = OTHER; note = 2'-O-methyl modified nucleotide with phosphorothioate linkage
  modified_base 2: mod_base = OTHER; note = 2'-fluoro modified nucleotide with phosphorothioate linkage
  modified_base 3: mod_base = OTHER; note = 2'-O-methyl modified nucleotide
  modified_base 4: mod_base = OTHER; note = 2'-O-methyl modified nucleotide
  modified_base 5: mod_base = OTHER; note = 2'-O-methyl modified nucleotide
  modified_base 6: mod_base = OTHER; note = 2'-fluoro modified nucleotide
  modified_base 7: mod_base = OTHER; note = 2'-O-methyl modified nucleotide
  modified_base 8: mod_base = OTHER; note = 2'-O-methyl modified nucleotide
  modified_base 9: mod_base = OTHER; note = 2'-O-methyl modified nucleotide
  modified_base 10: mod_base = OTHER; note = 2'-O-methyl modified nucleotide
  modified_base 11: mod_base = OTHER; note = 2'-O-methyl modified nucleotide
  modified_base 12: mod_base = OTHER; note = 2'-O-methyl modified nucleotide
  modified_base 13: mod_base = OTHER; note = 2'-O-methyl modified nucleotide
  modified_base 14: mod_base = OTHER; note = 2'-fluoro modified nucleotide
  modified_base 15: mod_base = OTHER; note = 2'-O-methyl modified nucleotide
  modified_base 16: mod_base = OTHER; note = 2'-fluoro modified nucleotide
  modified_base 17: mod_base = OTHER; note = 2'-O-methyl modified nucleotide
  modified_base 18: mod_base = OTHER; note = 2'-O-methyl modified nucleotide
  modified_base 19: mod_base = OTHER; note = 2'-O-methyl modified nucleotide with phosphorothioate linkage
  modified_base 20: mod_base = OTHER; note = 2'-O-methyl modified nucleotide with phosphorothioate linkage
  modified_base 21: mod_base = OTHER; note = 2'-O-methyl modified nucleotide
tgggttaaacatatatattga

SEQ ID NO: 987 - RNA, 21 nt, synthetic construct
  source 1..21: mol_type = other RNA
  modified_base 1: mod_base = OTHER; note = 2'-O-methyl modified nucleotide with phosphorothioate linkage
  modified_base 2: mod_base = OTHER; note = 2'-fluoro modified nucleotide with phosphorothioate linkage
  modified_base 3: mod_base = OTHER; note = 2'-O-methyl modified nucleotide
  modified_base 4: mod_base = OTHER; note = 2'-O-methyl modified nucleotide
  modified_base 5: mod_base = OTHER; note = 2'-O-methyl modified nucleotide
  modified_base 6: mod_base = OTHER; note = 2'-fluoro modified nucleotide
  modified_base 7: mod_base = OTHER; note = 2'-O-methyl modified nucleotide
  modified_base 8: mod_base = OTHER; note = 2'-O-methyl modified nucleotide
  modified_base 9: mod_base = OTHER; note = 2'-O-methyl modified nucleotide
  modified_base 10: mod_base = OTHER; note = 2'-O-methyl modified nucleotide
  modified_base 11: mod_base = OTHER; note = 2'-O-methyl modified nucleotide
  modified_base 12: mod_base = OTHER; note = 2'-O-methyl modified nucleotide
  modified_base 13: mod_base = OTHER; note = 2'-O-methyl modified nucleotide
  modified_base 14: mod_base = OTHER; note = 2'-fluoro modified nucleotide
  modified_base 15: mod_base = OTHER; note = 2'-O-methyl modified nucleotide
  modified_base 16: mod_base = OTHER; note = 2'-fluoro modified nucleotide
  modified_base 17: mod_base = OTHER; note = 2'-O-methyl modified nucleotide
  modified_base 18: mod_base = OTHER; note = 2'-O-methyl modified nucleotide
  modified_base 19: mod_base = OTHER; note = 2'-O-methyl modified nucleotide with phosphorothioate linkage
  modified_base 20: mod_base = OTHER; note = 2'-O-methyl modified nucleotide with phosphorothioate linkage
  modified_base 21: mod_base = OTHER; note = 2'-O-methyl modified nucleotide
tttgccaaagttgggtggcag

SEQ ID NO: 988 - RNA, 21 nt, synthetic construct
  source 1..21: mol_type = other RNA
  modified_base 1: mod_base = OTHER; note = 2'-O-methyl modified nucleotide with phosphorothioate linkage
  modified_base 2: mod_base = OTHER; note = 2'-fluoro modified nucleotide with phosphorothioate linkage
  modified_base 3: mod_base = OTHER; note = 2'-O-methyl modified nucleotide
  modified_base 4: mod_base = OTHER; note = 2'-O-methyl modified nucleotide
  modified_base 5: mod_base = OTHER; note = 2'-O-methyl modified nucleotide
  modified_base 6: mod_base = OTHER; note = 2'-fluoro modified nucleotide
  modified_base 7: mod_base = OTHER; note = 2'-O-methyl modified nucleotide
  modified_base 8: mod_base = OTHER; note = 2'-O-methyl modified nucleotide
  modified_base 9: mod_base = OTHER; note = 2'-O-methyl modified nucleotide
  modified_base 10: mod_base = OTHER; note = 2'-O-methyl modified nucleotide
  modified_base 11: mod_base = OTHER; note = 2'-O-methyl modified nucleotide
  modified_base 12: mod_base = OTHER; note = 2'-O-methyl modified nucleotide
  modified_base 13: mod_base = OTHER; note = 2'-O-methyl modified nucleotide
  modified_base 14: mod_base = OTHER; note = 2'-fluoro modified nucleotide
  modified_base 15: mod_base = OTHER; note = 2'-O-methyl modified nucleotide
  modified_base 16: mod_base = OTHER; note = 2'-fluoro modified nucleotide
  modified_base 17: mod_base = OTHER; note = 2'-O-methyl modified nucleotide
  modified_base 18: mod_base = OTHER; note = 2'-O-methyl modified nucleotide
  modified_base 19: mod_base = OTHER; note = 2'-O-methyl modified nucleotide with phosphorothioate linkage
  modified_base 20: mod_base = OTHER; note = 2'-O-methyl modified nucleotide with phosphorothioate linkage
  modified_base 21: mod_base = OTHER; note = 2'-O-methyl modified nucleotide
tccaagctggaaaatcatgta

SEQ ID NO: 989 - RNA, 21 nt, synthetic construct
  source 1..21: mol_type = other RNA
  modified_base 1: mod_base = OTHER; note = 2'-O-methyl modified nucleotide with phosphorothioate linkage
  modified_base 2: mod_base = OTHER; note = 2'-fluoro modified nucleotide with phosphorothioate linkage
  modified_base 3: mod_base = OTHER; note = 2'-O-methyl modified nucleotide
  modified_base 4: mod_base = OTHER; note = 2'-O-methyl modified nucleotide
  modified_base 5: mod_base = OTHER; note = 2'-O-methyl modified nucleotide
  modified_base 6: mod_base = OTHER; note = 2'-fluoro modified nucleotide
  modified_base 7: mod_base = OTHER; note = 2'-O-methyl modified nucleotide
  modified_base 8: mod_base = OTHER; note = 2'-O-methyl modified nucleotide
  modified_base 9: mod_base = OTHER; note = 2'-O-methyl modified nucleotide
  modified_base 10: mod_base = OTHER; note = 2'-O-methyl modified nucleotide
  modified_base 11: mod_base = OTHER; note = 2'-O-methyl modified nucleotide
  modified_base 12: mod_base = OTHER; note = 2'-O-methyl modified nucleotide
  modified_base 13: mod_base = OTHER; note = 2'-O-methyl modified nucleotide
  modified_base 14: mod_base = OTHER; note = 2'-fluoro modified nucleotide
  modified_base 15: mod_base = OTHER; note = 2'-O-methyl modified nucleotide
  modified_base 16: mod_base = OTHER; note = 2'-fluoro modified nucleotide
  modified_base 17: mod_base = OTHER; note = 2'-O-methyl modified nucleotide
  modified_base 18: mod_base = OTHER; note = 2'-O-methyl modified nucleotide
  modified_base 19: mod_base = OTHER; note = 2'-O-methyl modified nucleotide with phosphorothioate linkage
  modified_base 20: mod_base = OTHER; note = 2'-O-methyl modified nucleotide with phosphorothioate linkage
  modified_base 21: mod_base = OTHER; note = 2'-O-methyl modified nucleotide
taggggcatgatgccatactg

SEQ ID NO: 990 - RNA, 21 nt, synthetic construct
  source 1..21: mol_type = other RNA
  modified_base 1: mod_base = OTHER; note = 2'-O-methyl modified nucleotide with phosphorothioate linkage
  modified_base 2: mod_base = OTHER; note = 2'-fluoro modified nucleotide with phosphorothioate linkage
  modified_base 3: mod_base = OTHER; note = 2'-O-methyl modified nucleotide
  modified_base 4: mod_base = OTHER; note = 2'-O-methyl modified nucleotide
  modified_base 5: mod_base = OTHER; note = 2'-O-methyl modified nucleotide
  modified_base 6: mod_base = OTHER; note = 2'-fluoro modified nucleotide
  modified_base 7: mod_base = OTHER; note = 2'-O-methyl modified nucleotide
  modified_base 8: mod_base = OTHER; note = 2'-O-methyl modified nucleotide
  modified_base 9: mod_base = OTHER; note = 2'-O-methyl modified nucleotide
  modified_base 10: mod_base = OTHER; note = 2'-O-methyl modified nucleotide
  modified_base 11: mod_base = OTHER; note = 2'-O-methyl modified nucleotide
  modified_base 12: mod_base = OTHER; note = 2'-O-methyl modified nucleotide
  modified_base 13: mod_base = OTHER; note = 2'-O-methyl modified nucleotide
  modified_base 14: mod_base = OTHER; note = 2'-fluoro modified nucleotide
  modified_base 15: mod_base = OTHER; note = 2'-O-methyl modified nucleotide
  modified_base 16: mod_base = OTHER; note = 2'-fluoro modified nucleotide
  modified_base 17: mod_base = OTHER; note = 2'-O-methyl modified nucleotide
  modified_base 18: mod_base = OTHER; note = 2'-O-methyl modified nucleotide
  modified_base 19: mod_base = OTHER; note = 2'-O-methyl modified nucleotide with phosphorothioate linkage
  modified_base 20: mod_base = OTHER; note = 2'-O-methyl modified nucleotide with phosphorothioate linkage
  modified_base 21: mod_base = OTHER; note = 2'-O-methyl modified nucleotide
tggtccaatgacttcaggtgg

SEQ ID NO: 991 - RNA, 21 nt, synthetic construct
  source 1..21: mol_type = other RNA
  modified_base 1: mod_base = OTHER; note = 2'-O-methyl modified nucleotide with phosphorothioate linkage
  modified_base 2: mod_base = OTHER; note = 2'-fluoro modified nucleotide with phosphorothioate linkage
  modified_base 3: mod_base = OTHER; note = 2'-O-methyl modified nucleotide
  modified_base 4: mod_base = OTHER; note = 2'-O-methyl modified nucleotide
  modified_base 5: mod_base = OTHER; note = 2'-O-methyl modified nucleotide
  modified_base 6: mod_base = OTHER; note = 2'-fluoro modified nucleotide
  modified_base 7: mod_base = OTHER; note = 2'-O-methyl modified nucleotide
  modified_base 8: mod_base = OTHER; note = 2'-O-methyl modified nucleotide
  modified_base 9: mod_base = OTHER; note = 2'-O-methyl modified nucleotide
  modified_base 10: mod_base = OTHER; note = 2'-O-methyl modified nucleotide
  modified_base 11: mod_base = OTHER; note = 2'-O-methyl modified nucleotide
  modified_base 12: mod_base = OTHER; note = 2'-O-methyl modified nucleotide
  modified_base 13: mod_base = OTHER; note = 2'-O-methyl modified nucleotide
  modified_base 14: mod_base = OTHER; note = 2'-fluoro modified nucleotide
  modified_base 15: mod_base = OTHER; note = 2'-O-methyl modified nucleotide
  modified_base 16: mod_base = OTHER; note = 2'-fluoro modified nucleotide
  modified_base 17: mod_base = OTHER; note = 2'-O-methyl modified nucleotide
  modified_base 18: mod_base = OTHER; note = 2'-O-methyl modified nucleotide
  modified_base 19: mod_base = OTHER; note = 2'-O-methyl modified nucleotide with phosphorothioate linkage
  modified_base 20: mod_base = OTHER; note = 2'-O-methyl modified nucleotide with phosphorothioate linkage
  modified_base 21: mod_base = OTHER; note = 2'-O-methyl modified nucleotide
ttttatagggcaccttgtcct

SEQ ID NO: 992 - RNA, 21 nt, synthetic construct
  source 1..21: mol_type = other RNA
  modified_base 1: mod_base = OTHER; note = 2'-O-methyl modified nucleotide with phosphorothioate linkage
  modified_base 2: mod_base = OTHER; note = 2'-fluoro modified nucleotide with phosphorothioate linkage
  modified_base 3: mod_base = OTHER; note = 2'-O-methyl modified nucleotide
  modified_base 4: mod_base = OTHER; note = 2'-O-methyl modified nucleotide
  modified_base 5: mod_base = OTHER; note = 2'-O-methyl modified nucleotide
  modified_base 6: mod_base = OTHER; note = 2'-fluoro modified nucleotide
  modified_base 7: mod_base = OTHER; note = 2'-O-methyl modified nucleotide
  modified_base 8: mod_base = OTHER; note = 2'-O-methyl modified nucleotide
  modified_base 9: mod_base = OTHER; note = 2'-O-methyl modified nucleotide
  modified_base 10: mod_base = OTHER; note = 2'-O-methyl modified nucleotide
  modified_base 11: mod_base = OTHER; note = 2'-O-methyl modified nucleotide
  modified_base 12: mod_base = OTHER; note = 2'-O-methyl modified nucleotide
  modified_base 13: mod_base = OTHER; note = 2'-O-methyl modified nucleotide
  modified_base 14: mod_base = OTHER; note = 2'-fluoro modified nucleotide
  modified_base 15: mod_base = OTHER; note = 2'-O-methyl modified nucleotide
  modified_base 16: mod_base = OTHER; note = 2'-fluoro modified nucleotide
  modified_base 17: mod_base = OTHER; note = 2'-O-methyl modified nucleotide
  modified_base 18: mod_base = OTHER; note = 2'-O-methyl modified nucleotide
  modified_base 19: mod_base = OTHER; note = 2'-O-methyl modified nucleotide with phosphorothioate linkage
  modified_base 20: mod_base = OTHER; note = 2'-O-methyl modified nucleotide with phosphorothioate linkage
  modified_base 21: mod_base = OTHER; note = 2'-O-methyl modified nucleotide
tttaggcttccataagtgagc

SEQ ID NO: 993 - RNA, 21 nt, synthetic construct
  source 1..21: mol_type = other RNA
  modified_base 1: mod_base = OTHER; note = 2'-O-methyl modified nucleotide with phosphorothioate linkage
  modified_base 2: mod_base = OTHER; note = 2'-fluoro modified nucleotide with phosphorothioate linkage
  modified_base 3: mod_base = OTHER; note = 2'-O-methyl modified nucleotide
  modified_base 4: mod_base = OTHER; note = 2'-O-methyl modified nucleotide
  modified_base 5: mod_base = OTHER; note = 2'-O-methyl modified nucleotide
  modified_base 6: mod_base = OTHER; note = 2'-fluoro modified nucleotide
  modified_base 7: mod_base = OTHER; note = 2'-O-methyl modified nucleotide
  modified_base 8: mod_base = OTHER; note = 2'-O-methyl modified nucleotide
  modified_base 9: mod_base = OTHER; note = 2'-O-methyl modified nucleotide
  modified_base 10: mod_base = OTHER; note = 2'-O-methyl modified nucleotide
  modified_base 11: mod_base = OTHER; note = 2'-O-methyl modified nucleotide
  modified_base 12: mod_base = OTHER; note = 2'-O-methyl modified nucleotide
  modified_base 13: mod_base = OTHER; note = 2'-O-methyl modified nucleotide
  modified_base 14: mod_base = OTHER; note = 2'-fluoro modified nucleotide
  modified_base 15: mod_base = OTHER; note = 2'-O-methyl modified nucleotide
  modified_base 16: mod_base = OTHER; note = 2'-fluoro modified nucleotide
  modified_base 17: mod_base = OTHER; note = 2'-O-methyl modified nucleotide
  modified_base 18: mod_base = OTHER; note = 2'-O-methyl modified nucleotide
  modified_base 19: mod_base = OTHER; note = 2'-O-methyl modified nucleotide with phosphorothioate linkage
  modified_base 20: mod_base = OTHER; note = 2'-O-methyl modified nucleotide with phosphorothioate linkage
  modified_base 21: mod_base = OTHER; note = 2'-O-methyl modified nucleotide
ttttggatttgaggacgatcc

SEQ ID NO: 994 - RNA, 21 nt, synthetic construct
  source 1..21: mol_type = other RNA
  modified_base 1: mod_base = OTHER; note = 2'-O-methyl modified nucleotide with phosphorothioate linkage
  modified_base 2: mod_base = OTHER; note = 2'-fluoro modified nucleotide with phosphorothioate linkage
  modified_base 3: mod_base = OTHER; note = 2'-O-methyl modified nucleotide
  modified_base 4: mod_base = OTHER; note = 2'-O-methyl modified nucleotide
  modified_base 5: mod_base = OTHER; note = 2'-O-methyl modified nucleotide
  modified_base 6: mod_base = OTHER; note = 2'-fluoro modified nucleotide
  modified_base 7: mod_base = OTHER; note = 2'-O-methyl modified nucleotide
  modified_base 8: mod_base = OTHER; note = 2'-O-methyl modified nucleotide
  modified_base 9: mod_base = OTHER; note = 2'-O-methyl modified nucleotide
  modified_base 10: mod_base = OTHER; note = 2'-O-methyl modified nucleotide
  modified_base 11: mod_base = OTHER; note = 2'-O-methyl modified nucleotide
  modified_base 12: mod_base = OTHER; note = 2'-O-methyl modified nucleotide
  modified_base 13: mod_base = OTHER; note = 2'-O-methyl modified nucleotide
  modified_base 14: mod_base = OTHER; note = 2'-fluoro modified nucleotide
  modified_base 15: mod_base = OTHER; note = 2'-O-methyl modified nucleotide
  modified_base 16: mod_base = OTHER; note = 2'-fluoro modified nucleotide
  modified_base 17: mod_base = OTHER; note = 2'-O-methyl modified nucleotide
  modified_base 18: mod_base = OTHER; note = 2'-O-methyl modified nucleotide
  modified_base 19: mod_base = OTHER; note = 2'-O-methyl modified nucleotide with phosphorothioate linkage
  modified_base 20: mod_base = OTHER; note = 2'-O-methyl modified nucleotide with phosphorothioate linkage
  modified_base 21: mod_base = OTHER; note = 2'-O-methyl modified nucleotide
tggtcatcacaatgctgaggt

SEQ ID NO: 995 - RNA, 21 nt, synthetic construct
  source 1..21: mol_type = other RNA
  modified_base 1: mod_base = OTHER; note = 2'-O-methyl modified nucleotide with phosphorothioate linkage
  modified_base 2: mod_base = OTHER; note = 2'-fluoro modified nucleotide with phosphorothioate linkage
  modified_base 3: mod_base = OTHER; note = 2'-O-methyl modified nucleotide
  modified_base 4: mod_base = OTHER; note = 2'-O-methyl modified nucleotide
  modified_base 5: mod_base = OTHER; note = 2'-O-methyl modified nucleotide
  modified_base 6: mod_base = OTHER; note = 2'-fluoro modified nucleotide
  modified_base 7: mod_base = OTHER; note = 2'-O-methyl modified nucleotide
  modified_base 8: mod_base = OTHER; note = 2'-O-methyl modified nucleotide
  modified_base 9: mod_base = OTHER; note = 2'-O-methyl modified nucleotide
  modified_base 10: mod_base = OTHER; note = 2'-O-methyl modified nucleotide
  modified_base 11: mod_base = OTHER; note = 2'-O-methyl modified nucleotide
  modified_base 12: mod_base = OTHER; note = 2'-O-methyl modified nucleotide
  modified_base 13: mod_base = OTHER; note = 2'-O-methyl modified nucleotide
  modified_base 14: mod_base = OTHER; note = 2'-fluoro modified nucleotide
  modified_base 15: mod_base = OTHER; note = 2'-O-methyl modified nucleotide
  modified_base 16: mod_base = OTHER; note = 2'-fluoro modified nucleotide
  modified_base 17: mod_base = OTHER; note = 2'-O-methyl modified nucleotide
  modified_base 18: mod_base = OTHER; note = 2'-O-methyl modified nucleotide
  modified_base 19: mod_base = OTHER; note = 2'-O-methyl modified nucleotide with phosphorothioate linkage
  modified_base 20: mod_base = OTHER; note = 2'-O-methyl modified nucleotide with phosphorothioate linkage
  modified_base 21: mod_base = OTHER; note = 2'-O-methyl modified nucleotide
ttgtctgtgttcccggccaag

SEQ ID NO: 996 - RNA, 21 nt, synthetic construct
  source 1..21: mol_type = other RNA
  modified_base 1: mod_base = OTHER; note = 2'-O-methyl modified nucleotide with phosphorothioate linkage
  modified_base 2: mod_base = OTHER; note = 2'-fluoro modified nucleotide with phosphorothioate linkage
  modified_base 3: mod_base = OTHER; note = 2'-O-methyl modified nucleotide
  modified_base 4: mod_base = OTHER; note = 2'-O-methyl modified nucleotide
  modified_base 5: mod_base = OTHER; note = 2'-O-methyl modified nucleotide
  modified_base 6: mod_base = OTHER; note = 2'-fluoro modified nucleotide
  modified_base 7: mod_base = OTHER; note = 2'-O-methyl modified nucleotide
  modified_base 8: mod_base = OTHER; note = 2'-O-methyl modified nucleotide
  modified_base 9: mod_base = OTHER; note = 2'-O-methyl modified nucleotide
  modified_base 10: mod_base = OTHER; note = 2'-O-methyl modified nucleotide
  modified_base 11: mod_base = OTHER; note = 2'-O-methyl modified nucleotide
  modified_base 12: mod_base = OTHER; note = 2'-O-methyl modified nucleotide
  modified_base 13: mod_base = OTHER; note = 2'-O-methyl modified nucleotide
  modified_base 14: mod_base = OTHER; note = 2'-fluoro modified nucleotide
  modified_base 15: mod_base = OTHER; note = 2'-O-methyl modified nucleotide
  modified_base 16: mod_base = OTHER; note = 2'-fluoro modified nucleotide
  modified_base 17: mod_base = OTHER; note = 2'-O-methyl modified nucleotide
  modified_base 18: mod_base = OTHER; note = 2'-O-methyl modified nucleotide
  modified_base 19: mod_base = OTHER; note = 2'-O-methyl modified nucleotide with phosphorothioate linkage
  modified_base 20: mod_base = OTHER; note = 2'-O-methyl modified nucleotide with phosphorothioate linkage
  modified_base 21: mod_base = OTHER; note = 2'-O-methyl modified nucleotide
taagggctaggctgtgcaagg

SEQ ID NO: 997 - RNA, 21 nt, synthetic construct
  source 1..21: mol_type = other RNA
  modified_base 1: mod_base = OTHER; note = 2'-O-methyl modified nucleotide with phosphorothioate linkage
  modified_base 2: mod_base = OTHER; note = 2'-fluoro modified nucleotide with phosphorothioate linkage
  modified_base 3: mod_base = OTHER; note = 2'-O-methyl modified nucleotide
  modified_base 4: mod_base = OTHER; note = 2'-O-methyl modified nucleotide
  modified_base 5: mod_base = OTHER; note = 2'-O-methyl modified nucleotide
  modified_base 6: mod_base = OTHER; note = 2'-fluoro modified nucleotide
  modified_base 7: mod_base = OTHER; note = 2'-O-methyl modified nucleotide
  modified_base 8: mod_base = OTHER; note = 2'-O-methyl modified nucleotide
  modified_base 9: mod_base = OTHER; note = 2'-O-methyl modified nucleotide
  modified_base 10: mod_base = OTHER; note = 2'-O-methyl modified nucleotide
  modified_base 11: mod_base = OTHER; note = 2'-O-methyl modified nucleotide
  modified_base 12: mod_base = OTHER; note = 2'-O-methyl modified nucleotide
  modified_base 13: mod_base = OTHER; note = 2'-O-methyl modified nucleotide
  modified_base 14: mod_base = OTHER; note = 2'-fluoro modified nucleotide
  modified_base 15: mod_base = OTHER; note = 2'-O-methyl modified nucleotide
  modified_base 16: mod_base = OTHER; note = 2'-fluoro modified nucleotide
  modified_base 17: mod_base = OTHER; note = 2'-O-methyl modified nucleotide
  modified_base 18: mod_base = OTHER; note = 2'-O-methyl modified nucleotide
  modified_base 19: mod_base = OTHER; note = 2'-O-methyl modified nucleotide with phosphorothioate linkage
  modified_base 20: mod_base = OTHER; note = 2'-O-methyl modified nucleotide with phosphorothioate linkage
  modified_base 21: mod_base = OTHER; note = 2'-O-methyl modified nucleotide
taaagttgggtggcagggtga

SEQ ID NO: 998 - RNA, 21 nt, synthetic construct
  source 1..21: mol_type = other RNA
  modified_base 1: mod_base = OTHER; note = 2'-O-methyl modified nucleotide with phosphorothioate linkage
  modified_base 2: mod_base = OTHER; note = 2'-fluoro modified nucleotide with phosphorothioate linkage
  modified_base 3: mod_base = OTHER; note = 2'-O-methyl modified nucleotide
  modified_base 4: mod_base = OTHER; note = 2'-O-methyl modified nucleotide
  modified_base 5: mod_base = OTHER; note = 2'-O-methyl modified nucleotide
  modified_base 6: mod_base = OTHER; note = 2'-fluoro modified nucleotide
  modified_base 7: mod_base = OTHER; note = 2'-O-methyl modified nucleotide
  modified_base 8: mod_base = OTHER; note = 2'-O-methyl modified nucleotide
  modified_base 9: mod_base = OTHER; note = 2'-O-methyl modified nucleotide
  modified_base 10: mod_base = OTHER; note = 2'-O-methyl modified nucleotide
  modified_base 11: mod_base = OTHER; note = 2'-O-methyl modified nucleotide
  modified_base 12: mod_base = OTHER; note = 2'-O-methyl modified nucleotide
  modified_base 13: mod_base = OTHER; note = 2'-O-methyl modified nucleotide
  modified_base 14: mod_base = OTHER; note = 2'-fluoro modified nucleotide
  modified_base 15: mod_base = OTHER; note = 2'-O-methyl modified nucleotide
  modified_base 16: mod_base = OTHER; note = 2'-fluoro modified nucleotide
  modified_base 17: mod_base = OTHER; note = 2'-O-methyl modified nucleotide
  modified_base 18: mod_base = OTHER; note = 2'-O-methyl modified nucleotide
  modified_base 19: mod_base = OTHER; note = 2'-O-methyl modified nucleotide with phosphorothioate linkage
  modified_base 20: mod_base = OTHER; note = 2'-O-methyl modified nucleotide with phosphorothioate linkage
  modified_base 21: mod_base = OTHER; note = 2'-O-methyl modified nucleotide
tcgatccctatggtgcaagga

SEQ ID NO: 999 - RNA, 21 nt, synthetic construct
  source 1..21: mol_type = other RNA
  modified_base 1: mod_base = OTHER; note = 2'-O-methyl modified nucleotide with phosphorothioate linkage
  modified_base 2: mod_base = OTHER; note = 2'-fluoro modified nucleotide with phosphorothioate linkage
  modified_base 3: mod_base = OTHER; note = 2'-O-methyl modified nucleotide
  modified_base 4: mod_base = OTHER; note = 2'-O-methyl modified nucleotide
  modified_base 5: mod_base = OTHER; note = 2'-O-methyl modified nucleotide
  modified_base 6: mod_base = OTHER; note = 2'-fluoro modified nucleotide
  modified_base 7: mod_base = OTHER; note = 2'-O-methyl modified nucleotide
  modified_base 8: mod_base = OTHER; note = 2'-O-methyl modified nucleotide
  modified_base 9: mod_base = OTHER; note = 2'-O-methyl modified nucleotide
  modified_base 10: mod_base = OTHER; note = 2'-O-methyl modified nucleotide
  modified_base 11: mod_base = OTHER; note = 2'-O-methyl modified nucleotide
  modified_base 12: mod_base = OTHER; note = 2'-O-methyl modified nucleotide
  modified_base 13: mod_base = OTHER; note = 2'-O-methyl modified nucleotide
  modified_base 14: mod_base = OTHER; note = 2'-fluoro modified nucleotide
  modified_base 15: mod_base = OTHER; note = 2'-O-methyl modified nucleotide
  modified_base 16: mod_base = OTHER; note = 2'-fluoro modified nucleotide
  modified_base 17: mod_base = OTHER; note = 2'-O-methyl modified nucleotide
  modified_base 18: mod_base = OTHER; note = 2'-O-methyl modified nucleotide
  modified_base 19: mod_base = OTHER; note = 2'-O-methyl modified nucleotide with phosphorothioate linkage
  modified_base 20: mod_base = OTHER; note = 2'-O-methyl modified nucleotide with phosphorothioate linkage
  modified_base 21: mod_base = OTHER; note = 2'-O-methyl modified nucleotide
taatgatgatcatccctccct

SEQ ID NO: 1000 - RNA, 21 nt, synthetic construct
  source 1..21: mol_type = other RNA
  modified_base 1: mod_base = OTHER; note = 2'-O-methyl modified nucleotide with phosphorothioate linkage
  modified_base 2: mod_base = OTHER; note = 2'-fluoro modified nucleotide with phosphorothioate linkage
  modified_base 3: mod_base = OTHER; note = 2'-O-methyl modified nucleotide
  modified_base 4: mod_base = OTHER; note = 2'-O-methyl modified nucleotide
  modified_base 5: mod_base = OTHER; note = 2'-O-methyl modified nucleotide
  modified_base 6: mod_base = OTHER; note = 2'-fluoro modified nucleotide
  modified_base 7: mod_base = OTHER; note = 2'-O-methyl modified nucleotide
  modified_base 8: mod_base = OTHER; note = 2'-O-methyl modified nucleotide
  modified_base 9: mod_base = OTHER; note = 2'-O-methyl modified nucleotide
  modified_base 10: mod_base = OTHER; note = 2'-O-methyl modified nucleotide
  modified_base 11: mod_base = OTHER; note = 2'-O-methyl modified nucleotide
  modified_base 12: mod_base = OTHER; note = 2'-O-methyl modified nucleotide
  modified_base 13: mod_base = OTHER; note = 2'-O-methyl modified nucleotide
  modified_base 14: mod_base = OTHER; note = 2'-fluoro modified nucleotide
  modified_base 15: mod_base = OTHER; note = 2'-O-methyl modified nucleotide
  modified_base 16: mod_base = OTHER; note = 2'-fluoro modified nucleotide
  modified_base 17: mod_base = OTHER; note = 2'-O-methyl modified nucleotide
  modified_base 18: mod_base = OTHER; note = 2'-O-methyl modified nucleotide
  modified_base 19: mod_base = OTHER; note = 2'-O-methyl modified nucleotide with phosphorothioate linkage
  modified_base 20: mod_base = OTHER; note = 2'-O-methyl modified nucleotide with phosphorothioate linkage
  modified_base 21: mod_base = OTHER; note = 2'-O-methyl modified nucleotide
tttgattagttcaggaattga

SEQ ID NO: 1001 - RNA, 21 nt, synthetic construct
  source 1..21: mol_type = other RNA
  modified_base 1: mod_base = OTHER; note = 2'-O-methyl modified nucleotide with phosphorothioate linkage
  modified_base 2: mod_base = OTHER; note = 2'-fluoro modified nucleotide with phosphorothioate linkage
  modified_base 3: mod_base = OTHER; note = 2'-O-methyl modified nucleotide
  modified_base 4: mod_base = OTHER; note = 2'-O-methyl modified nucleotide
  modified_base 5: mod_base = OTHER; note = 2'-O-methyl modified nucleotide
  modified_base 6: mod_base = OTHER; note = 2'-fluoro modified nucleotide
  modified_base 7: mod_base = OTHER; note = 2'-O-methyl modified nucleotide
  modified_base 8: mod_base = OTHER; note = 2'-O-methyl modified nucleotide
  modified_base 9: mod_base = OTHER; note = 2'-O-methyl modified nucleotide
  modified_base 10: mod_base = OTHER; note = 2'-O-methyl modified nucleotide
  modified_base 11: mod_base = OTHER; note = 2'-O-methyl modified nucleotide
  modified_base 12: mod_base = OTHER; note = 2'-O-methyl modified nucleotide
  modified_base 13: mod_base = OTHER; note = 2'-O-methyl modified nucleotide
  modified_base 14: mod_base = OTHER; note = 2'-fluoro modified nucleotide
  modified_base 15: mod_base = OTHER; note = 2'-O-methyl modified nucleotide
  modified_base 16: mod_base = OTHER; note = 2'-fluoro modified nucleotide
  modified_base 17: mod_base = OTHER; note = 2'-O-methyl modified nucleotide
  modified_base 18: mod_base = OTHER; note = 2'-O-methyl modified nucleotide
  modified_base 19: mod_base = OTHER; note = 2'-O-methyl modified nucleotide with phosphorothioate linkage
  modified_base 20: mod_base = OTHER; note = 2'-O-methyl modified nucleotide with phosphorothioate linkage
  modified_base 21: mod_base = OTHER; note = 2'-O-methyl modified nucleotide
tcgtttcttgtgcagttcttg

SEQ ID NO: 1002 - RNA, 21 nt, synthetic construct
  source 1..21: mol_type = other RNA
  modified_base 1: mod_base = OTHER; note = 2'-O-methyl modified nucleotide with phosphorothioate linkage
  modified_base 2: mod_base = OTHER; note = 2'-fluoro modified nucleotide with phosphorothioate linkage
  modified_base 3: mod_base = OTHER; note = 2'-O-methyl modified nucleotide
  modified_base 4: mod_base = OTHER; note = 2'-O-methyl modified nucleotide
  modified_base 5: mod_base = OTHER; note = 2'-O-methyl modified nucleotide
  modified_base 6: mod_base = OTHER; note = 2'-fluoro modified nucleotide
  modified_base 7: mod_base = OTHER; note = 2'-O-methyl modified nucleotide
  modified_base 8: mod_base = OTHER; note = 2'-O-methyl modified nucleotide
  modified_base 9: mod_base = OTHER; note = 2'-O-methyl modified nucleotide
  modified_base 10: mod_base = OTHER; note = 2'-O-methyl modified nucleotide
  modified_base 11: mod_base = OTHER; note = 2'-O-methyl modified nucleotide
  modified_base 12: mod_base = OTHER; note = 2'-O-methyl modified nucleotide
  modified_base 13: mod_base = OTHER; note = 2'-O-methyl modified nucleotide
  modified_base 14: mod_base = OTHER; note = 2'-fluoro modified nucleotide
  modified_base 15: mod_base = OTHER; note = 2'-O-methyl modified nucleotide
  modified_base 16: mod_base = OTHER; note = 2'-fluoro modified nucleotide
  modified_base 17: mod_base = OTHER; note = 2'-O-methyl modified nucleotide
  modified_base 18: mod_base = OTHER; note = 2'-O-methyl modified nucleotide
  modified_base 19: mod_base = OTHER; note = 2'-O-methyl modified nucleotide with phosphorothioate linkage
  modified_base 20: mod_base = OTHER; note = 2'-O-methyl modified nucleotide with phosphorothioate linkage
  modified_base 21: mod_base = OTHER; note = 2'-O-methyl modified nucleotide
tgcttgccaaagttgggtggc

SEQ ID NO: 1003 - RNA, 21 nt, synthetic construct
  source 1..21: mol_type = other RNA
  modified_base 1: mod_base = OTHER; note = 2'-O-methyl modified nucleotide with phosphorothioate linkage
  modified_base 2: mod_base = OTHER; note = 2'-fluoro modified nucleotide with phosphorothioate linkage
  modified_base 3: mod_base = OTHER; note = 2'-O-methyl modified nucleotide
  modified_base 4: mod_base = OTHER; note = 2'-O-methyl modified nucleotide
  modified_base 5: mod_base = OTHER; note = 2'-O-methyl modified nucleotide
  modified_base 6: mod_base = OTHER; note = 2'-fluoro modified nucleotide
  modified_base 7: mod_base = OTHER; note = 2'-O-methyl modified nucleotide
  modified_base 8: mod_base = OTHER; note = 2'-O-methyl modified nucleotide
  modified_base 9: mod_base = OTHER; note = 2'-O-methyl modified nucleotide
  modified_base 10: mod_base = OTHER; note = 2'-O-methyl modified nucleotide
  modified_base 11: mod_base = OTHER; note = 2'-O-methyl modified nucleotide
  modified_base 12: mod_base = OTHER; note = 2'-O-methyl modified nucleotide
  modified_base 13: mod_base = OTHER; note = 2'-O-methyl modified nucleotide
  modified_base 14: mod_base = OTHER; note = 2'-fluoro modified nucleotide
  modified_base 15: mod_base = OTHER; note = 2'-O-methyl modified nucleotide
  modified_base 16: mod_base = OTHER; note = 2'-fluoro modified nucleotide
  modified_base 17: mod_base = OTHER; note = 2'-O-methyl modified nucleotide
  modified_base 18: mod_base = OTHER; note = 2'-O-methyl modified nucleotide
  modified_base 19: mod_base = OTHER; note = 2'-O-methyl modified nucleotide with phosphorothioate linkage
  modified_base 20: mod_base = OTHER; note = 2'-O-methyl modified nucleotide with phosphorothioate linkage
  modified_base 21: mod_base = OTHER; note = 2'-O-methyl modified nucleotide
tctatggtgcaaggaatgaga

SEQ ID NO: 1004 - RNA, 21 nt, synthetic construct
  source 1..21: mol_type = other RNA
  modified_base 1: mod_base = OTHER; note = 2'-O-methyl modified nucleotide with phosphorothioate linkage
  modified_base 2: mod_base = OTHER; note = 2'-fluoro modified nucleotide with phosphorothioate linkage
  modified_base 3: mod_base = OTHER; note = 2'-O-methyl modified nucleotide
  modified_base 4: mod_base = OTHER; note = 2'-O-methyl modified nucleotide
  modified_base 5: mod_base = OTHER; note = 2'-O-methyl modified nucleotide
  modified_base 6: mod_base = OTHER; note = 2'-fluoro modified nucleotide
  modified_base 7: mod_base = OTHER; note = 2'-O-methyl modified nucleotide
  modified_base 8: mod_base = OTHER; note = 2'-O-methyl modified nucleotide
  modified_base 9: mod_base = OTHER; note = 2'-O-methyl modified nucleotide
  modified_base 10: mod_base = OTHER; note = 2'-O-methyl modified nucleotide
  modified_base 11: mod_base = OTHER; note = 2'-O-methyl modified nucleotide
  modified_base 12: mod_base = OTHER; note = 2'-O-methyl modified nucleotide
  modified_base 13: mod_base = OTHER; note = 2'-O-methyl modified nucleotide
  modified_base 14: mod_base = OTHER; note = 2'-fluoro modified nucleotide
  modified_base 15: mod_base = OTHER; note = 2'-O-methyl modified nucleotide
  modified_base 16: mod_base = OTHER; note = 2'-fluoro modified nucleotide
  modified_base 17: mod_base = OTHER; note = 2'-O-methyl modified nucleotide
  modified_base 18: mod_base = OTHER; note = 2'-O-methyl modified nucleotide
  modified_base 19: mod_base = OTHER; note = 2'-O-methyl modified nucleotide with phosphorothioate linkage
  modified_base 20: mod_base = OTHER; note = 2'-O-methyl modified nucleotide with phosphorothioate linkage
  modified_base 21: mod_base = OTHER; note = 2'-O-methyl modified nucleotide
tgtggccgtttggatttgagg

SEQ ID NO: 1005 - RNA, 19 nt, synthetic construct
  source 1..19: mol_type = other RNA
  modified_base 1: mod_base = OTHER; note = 2'-O-methyl modified nucleotide with phosphorothioate linkage
  modified_base 2: mod_base = OTHER; note = 2'-O-methyl modified nucleotide with phosphorothioate linkage
  modified_base 3: mod_base = OTHER; note = 2'-O-methyl modified nucleotide
  modified_base 4: mod_base = OTHER; note = 2'-O-methyl modified nucleotide
  modified_base 5: mod_base = OTHER; note = 2'-fluoro modified nucleotide
  modified_base 6: mod_base = OTHER; note = 2'-O-methyl modified nucleotide
  modified_base 7: mod_base = OTHER; note = 2'-fluoro modified nucleotide
  modified_base 8: mod_base = OTHER; note = 2'-fluoro modified nucleotide
  modified_base 9: mod_base = OTHER; note = 2'-fluoro modified nucleotide
  modified_base 10: mod_base = OTHER; note = 2'-O-methyl modified nucleotide
  modified_base 11: mod_base = OTHER; note = 2'-O-methyl modified nucleotide
  modified_base 12: mod_base = OTHER; note = 2'-O-methyl modified nucleotide
  modified_base 13: mod_base = OTHER; note = 2'-O-methyl modified nucleotide
  modified_base 14: mod_base = OTHER; note = 2'-O-methyl modified nucleotide
  modified_base 15: mod_base = OTHER; note = 2'-O-methyl modified nucleotide
  modified_base 16: mod_base = OTHER; note = 2'-O-methyl modified nucleotide
  modified_base 17: mod_base = OTHER; note = 2'-O-methyl modified nucleotide
  modified_base 18: mod_base = OTHER; note = 2'-O-methyl modified nucleotide
  modified_base 19: mod_base = OTHER; note = 2'-O-methyl modified nucleotide
gacaaggtgccctacaaaa

SEQ ID NO: 1006 - RNA, 19 nt, synthetic construct
  source 1..19: mol_type = other RNA
  modified_base 1: mod_base = OTHER; note = 2'-O-methyl modified nucleotide with phosphorothioate linkage
  modified_base 2: mod_base = OTHER; note = 2'-O-methyl modified nucleotide with phosphorothioate linkage
  modified_base 3: mod_base = OTHER; note = 2'-O-methyl modified nucleotide
  modified_base 4: mod_base = OTHER; note = 2'-O-methyl modified nucleotide
  modified_base 5: mod_base = OTHER; note = 2'-fluoro modified nucleotide
  modified_base 6: mod_base = OTHER; note = 2'-O-methyl modified nucleotide
  modified_base 7: mod_base = OTHER; note = 2'-fluoro modified nucleotide
  modified_base 8: mod_base = OTHER; note = 2'-fluoro modified nucleotide
  modified_base 9: mod_base = OTHER; note = 2'-fluoro modified nucleotide
  modified_base 10: mod_base = OTHER; note = 2'-O-methyl modified nucleotide
  modified_base 11: mod_base = OTHER; note = 2'-O-methyl modified nucleotide
  modified_base 12: mod_base = OTHER; note = 2'-O-methyl modified nucleotide
  modified_base 13: mod_base = OTHER; note = 2'-O-methyl modified nucleotide
  modified_base 14: mod_base = OTHER; note = 2'-O-methyl modified nucleotide
  modified_base 15: mod_base = OTHER; note = 2'-O-methyl modified nucleotide
  modified_base 16: mod_base = OTHER; note = 2'-O-methyl modified nucleotide
  modified_base 17: mod_base = OTHER; note = 2'-O-methyl modified nucleotide
  modified_base 18: mod_base = OTHER; note = 2'-O-methyl modified nucleotide
  modified_base 19: mod_base = OTHER; note = 2'-O-methyl modified nucleotide
gccctacaaaggcattata

SEQ ID NO: 1007 - RNA, 19 nt, synthetic construct
  source 1..19: mol_type = other RNA
  modified_base 1: mod_base = OTHER; note = 2'-O-methyl modified nucleotide with phosphorothioate linkage
  modified_base 2: mod_base = OTHER; note = 2'-O-methyl modified nucleotide with phosphorothioate linkage
  modified_base 3: mod_base = OTHER; note = 2'-O-methyl modified nucleotide
  modified_base 4: mod_base = OTHER; note = 2'-O-methyl modified nucleotide
  modified_base 5: mod_base = OTHER; note = 2'-fluoro modified nucleotide
  modified_base 6: mod_base = OTHER; note = 2'-O-methyl modified nucleotide
  modified_base 7: mod_base = OTHER; note = 2'-fluoro modified nucleotide
  modified_base 8: mod_base = OTHER; note = 2'-fluoro modified nucleotide
  modified_base 9: mod_base = OTHER; note = 2'-fluoro modified nucleotide
  modified_base 10: mod_base = OTHER; note = 2'-O-methyl modified nucleotide
  modified_base 11: mod_base = OTHER; note = 2'-O-methyl modified nucleotide
  modified_base 12: mod_base = OTHER; note = 2'-O-methyl modified nucleotide
  modified_base 13: mod_base = OTHER; note = 2'-O-methyl modified nucleotide
  modified_base 14: mod_base = OTHER; note = 2'-O-methyl modified nucleotide
  modified_base 15: mod_base = OTHER; note = 2'-O-methyl modified nucleotide
  modified_base 16: mod_base = OTHER; note = 2'-O-methyl modified nucleotide
  modified_base 17: mod_base = OTHER; note = 2'-O-methyl modified nucleotide
  modified_base 18: mod_base = OTHER; note = 2'-O-methyl modified nucleotide
  modified_base 19: mod_base = OTHER; note = 2'-O-methyl modified nucleotide
gccacactatgtaccctaa

SEQ ID NO: 1008 - RNA, 19 nt, synthetic construct
  source 1..19: mol_type = other RNA
  modified_base 1: mod_base = OTHER; note = 2'-O-methyl modified nucleotide with phosphorothioate linkage
  modified_base 2: mod_base = OTHER; note = 2'-O-methyl modified nucleotide with phosphorothioate linkage
  modified_base 3: mod_base = OTHER; note = 2'-O-methyl modified nucleotide
  modified_base 4: mod_base = OTHER; note = 2'-O-methyl modified nucleotide
  modified_base 5: mod_base = OTHER; note = 2'-fluoro modified nucleotide
  modified_base 6: mod_base = OTHER; note = 2'-O-methyl modified nucleotide
  modified_base 7: mod_base = OTHER; note = 2'-fluoro modified nucleotide
  modified_base 8: mod_base = OTHER; note = 2'-fluoro modified nucleotide
  modified_base 9: mod_base = OTHER; note = 2'-fluoro modified nucleotide
  modified_base 10: mod_base = OTHER; note = 2'-O-methyl modified nucleotide
  modified_base 11: mod_base = OTHER; note = 2'-O-methyl modified nucleotide
  modified_base 12: mod_base = OTHER; note = 2'-O-methyl modified nucleotide
  modified_base 13: mod_base = OTHER; note = 2'-O-methyl modified nucleotide
  modified_base 14: mod_base = OTHER; note = 2'-O-methyl modified nucleotide
  modified_base 15: mod_base = OTHER; note = 2'-O-methyl modified nucleotide
  modified_base 16: mod_base = OTHER; note = 2'-O-methyl modified nucleotide
  modified_base 17: mod_base = OTHER; note = 2'-O-methyl modified nucleotide
  modified_base 18: mod_base = OTHER; note = 2'-O-methyl modified nucleotide
  modified_base 19: mod_base = OTHER; note = 2'-O-methyl modified nucleotide
cagcatcatgttcgtcata

SEQ ID NO: 1009 - RNA, 19 nt, synthetic construct
  source 1..19: mol_type = other RNA
  modified_base 1: mod_base = OTHER; note = 2'-O-methyl modified nucleotide with phosphorothioate linkage
  modified_base 2: mod_base = OTHER; note = 2'-O-methyl modified nucleotide with phosphorothioate linkage
  modified_base 3: mod_base = OTHER; note = 2'-O-methyl modified nucleotide
  modified_base 4: mod_base = OTHER; note = 2'-O-methyl modified nucleotide
  modified_base 5: mod_base = OTHER; note = 2'-fluoro modified nucleotide
  modified_base 6: mod_base = OTHER; note = 2'-O-methyl modified nucleotide
  modified_base 7: mod_base = OTHER; note = 2'-fluoro modified nucleotide
  modified_base 8: mod_base = OTHER; note = 2'-fluoro modified nucleotide
  modified_base 9: mod_base = OTHER; note = 2'-fluoro modified nucleotide
  modified_base 10: mod_base = OTHER; note = 2'-O-methyl modified nucleotide
  modified_base 11: mod_base = OTHER; note = 2'-O-methyl modified nucleotide
  modified_base 12: mod_base = OTHER; note = 2'-O-methyl modified nucleotide
  modified_base 13: mod_base = OTHER; note = 2'-O-methyl modified nucleotide
  modified_base 14: mod_base = OTHER; note = 2'-O-methyl modified nucleotide
  modified_base 15: mod_base = OTHER; note = 2'-O-methyl modified nucleotide
  modified_base 16: mod_base = OTHER; note = 2'-O-methyl modified nucleotide
  modified_base 17: mod_base = OTHER; note = 2'-O-methyl modified nucleotide
  modified_base 18: mod_base = OTHER; note = 2'-O-methyl modified nucleotide
  modified_base 19: mod_base = OTHER; note = 2'-O-methyl modified nucleotide
gttcgtcatgacaccacaa

SEQ ID NO: 1010 - RNA, 19 nt, synthetic construct
  source 1..19: mol_type = other RNA
  modified_base 1: mod_base = OTHER; note = 2'-O-methyl modified nucleotide with phosphorothioate linkage
  modified_base 2: mod_base = OTHER; note = 2'-O-methyl modified nucleotide with phosphorothioate linkage
  modified_base 3: mod_base = OTHER; note = 2'-O-methyl modified nucleotide
  modified_base 4: mod_base = OTHER; note = 2'-O-methyl modified nucleotide
  modified_base 5: mod_base = OTHER; note = 2'-fluoro modified nucleotide
  modified_base 6: mod_base = OTHER; note = 2'-O-methyl modified nucleotide
  modified_base 7: mod_base = OTHER; note = 2'-fluoro modified nucleotide
  modified_base 8: mod_base = OTHER; note = 2'-fluoro modified nucleotide
  modified_base 9: mod_base = OTHER; note = 2'-fluoro modified nucleotide
  modified_base 10: mod_base = OTHER; note = 2'-O-methyl modified nucleotide
  modified_base 11: mod_base = OTHER; note = 2'-O-methyl modified nucleotide
  modified_base 12: mod_base = OTHER; note = 2'-O-methyl modified nucleotide
  modified_base 13: mod_base = OTHER; note = 2'-O-methyl modified nucleotide
  modified_base 14: mod_base = OTHER; note = 2'-O-methyl modified nucleotide
  modified_base 15: mod_base = OTHER; note = 2'-O-methyl modified nucleotide
  modified_base 16: mod_base = OTHER; note = 2'-O-methyl modified nucleotide
  modified_base 17: mod_base = OTHER; note = 2'-O-methyl modified nucleotide
  modified_base 18: mod_base = OTHER; note = 2'-O-methyl modified nucleotide
  modified_base 19: mod_base = OTHER; note = 2'-O-methyl modified nucleotide
cgtcatgacaccacactta

SEQ ID NO: 1011 - RNA, 19 nt, synthetic construct
  source 1..19: mol_type = other RNA
  modified_base 1: mod_base = OTHER; note = 2'-O-methyl modified nucleotide with phosphorothioate linkage
  modified_base 2: mod_base = OTHER; note = 2'-O-methyl modified nucleotide with phosphorothioate linkage
  modified_base 3: mod_base = OTHER; note = 2'-O-methyl modified nucleotide
  modified_base 4: mod_base = OTHER; note = 2'-O-methyl modified nucleotide
  modified_base 5: mod_base = OTHER; note = 2'-fluoro modified nucleotide
  modified_base 6: mod_base = OTHER; note = 2'-O-methyl modified nucleotide
  modified_base 7: mod_base = OTHER; note = 2'-fluoro modified nucleotide
  modified_base 8: mod_base = OTHER; note = 2'-fluoro modified nucleotide
  modified_base 9: mod_base = OTHER; note = 2'-fluoro modified nucleotide
  modified_base 10: mod_base = OTHER; note = 2'-O-methyl modified nucleotide
  modified_base 11: mod_base = OTHER; note = 2'-O-methyl modified nucleotide
  modified_base 12: mod_base = OTHER; note = 2'-O-methyl modified nucleotide
  modified_base 13: mod_base = OTHER; note = 2'-O-methyl modified nucleotide
  modified_base 14: mod_base = OTHER; note = 2'-O-methyl modified nucleotide
  modified_base 15: mod_base = OTHER; note = 2'-O-methyl modified nucleotide
  modified_base 16: mod_base = OTHER; note = 2'-O-methyl modified nucleotide
  modified_base 17: mod_base = OTHER; note = 2'-O-methyl modified nucleotide
  modified_base 18: mod_base = OTHER; note = 2'-O-methyl modified nucleotide
  modified_base 19: mod_base = OTHER; note = 2'-O-methyl modified nucleotide
cagacgcaccatcagcata

SEQ ID NO: 1012 - RNA, 19 nt, synthetic construct
  source 1..19: mol_type = other RNA
  modified_base 1: mod_base = OTHER; note = 2'-O-methyl modified nucleotide with phosphorothioate linkage
  modified_base 2: mod_base = OTHER; note = 2'-O-methyl modified nucleotide with phosphorothioate linkage
  modified_base 3: mod_base = OTHER; note = 2'-O-methyl modified nucleotide
  modified_base 4: mod_base = OTHER; note = 2'-O-methyl modified nucleotide
  modified_base 5: mod_base = OTHER; note = 2'-fluoro modified nucleotide
  modified_base 6: mod_base = OTHER; note = 2'-O-methyl modified nucleotide
  modified_base 7: mod_base = OTHER; note = 2'-fluoro modified nucleotide
  modified_base 8: mod_base = OTHER; note = 2'-fluoro modified nucleotide
  modified_base 9: mod_base = OTHER; note = 2'-fluoro modified nucleotide
  modified_base 10: mod_base = OTHER; note = 2'-O-methyl modified nucleotide
  modified_base 11: mod_base = OTHER; note = 2'-O-methyl modified nucleotide
  modified_base 12: mod_base = OTHER; note = 2'-O-methyl modified nucleotide
  modified_base 13: mod_base = OTHER; note = 2'-O-methyl modified nucleotide
  modified_base 14: mod_base = OTHER; note = 2'-O-methyl modified nucleotide
  modified_base 15: mod_base = OTHER; note = 2'-O-methyl modified nucleotide
  modified_base 16: mod_base = OTHER; note = 2'-O-methyl modified nucleotide
  modified_base 17: mod_base = OTHER; note = 2'-O-methyl modified nucleotide
  modified_base 18: mod_base = OTHER; note = 2'-O-methyl modified nucleotide
  modified_base 19: mod_base = OTHER; note = 2'-O-methyl modified nucleotide
ctgttctaccatcctcaaa

SEQ ID NO: 1013 - RNA, 19 nt, synthetic construct
  source 1..19: mol_type = other RNA
  modified_base 1: mod_base = OTHER; note = 2'-O-methyl modified nucleotide with phosphorothioate linkage
  modified_base 2: mod_base = OTHER; note = 2'-O-methyl modified nucleotide with phosphorothioate linkage
  modified_base 3: mod_base = OTHER; note = 2'-O-methyl modified nucleotide
  modified_base 4: mod_base = OTHER; note = 2'-O-methyl modified nucleotide
  modified_base 5: mod_base = OTHER; note = 2'-fluoro modified nucleotide
  modified_base 6: mod_base = OTHER; note = 2'-O-methyl modified nucleotide
  modified_base 7: mod_base = OTHER; note = 2'-fluoro modified nucleotide
  modified_base 8: mod_base = OTHER; note = 2'-fluoro modified nucleotide
  modified_base 9: mod_base = OTHER; note = 2'-fluoro modified nucleotide
  modified_base 10: mod_base = OTHER; note = 2'-O-methyl modified nucleotide
  modified_base 11: mod_base = OTHER; note = 2'-O-methyl modified nucleotide
  modified_base 12: mod_base = OTHER; note = 2'-O-methyl modified nucleotide
  modified_base 13: mod_base = OTHER; note = 2'-O-methyl modified nucleotide
  modified_base 14: mod_base = OTHER; note = 2'-O-methyl modified nucleotide
  modified_base 15: mod_base = OTHER; note = 2'-O-methyl modified nucleotide
  modified_base 16: mod_base = OTHER; note = 2'-O-methyl modified nucleotide
  modified_base 17: mod_base = OTHER; note = 2'-O-methyl modified nucleotide
  modified_base 18: mod_base = OTHER; note = 2'-O-methyl modified nucleotide
  modified_base 19: mod_base = OTHER; note = 2'-O-methyl modified nucleotide
gcgtcattctggtagttaa

SEQ ID NO: 1014 - RNA, 19 nt, synthetic construct
  source 1..19: mol_type = other RNA
  modified_base 1: mod_base = OTHER; note = 2'-O-methyl modified nucleotide with phosphorothioate linkage
  modified_base 2: mod_base = OTHER; note = 2'-O-methyl modified nucleotide with phosphorothioate linkage
  modified_base 3: mod_base = OTHER; note = 2'-O-methyl modified nucleotide
  modified_base 4: mod_base = OTHER; note = 2'-O-methyl modified nucleotide
  modified_base 5: mod_base = OTHER; note = 2'-fluoro modified nucleotide
  modified_base 6: mod_base = OTHER; note = 2'-O-methyl modified nucleotide
  modified_base 7: mod_base = OTHER; note = 2'-fluoro modified nucleotide
  modified_base 8: mod_base = OTHER; note = 2'-fluoro modified nucleotide
  modified_base 9: mod_base = OTHER; note = 2'-fluoro modified nucleotide
  modified_base 10: mod_base = OTHER; note = 2'-O-methyl modified nucleotide
  modified_base 11: mod_base = OTHER; note = 2'-O-methyl modified nucleotide
  modified_base 12: mod_base = OTHER; note = 2'-O-methyl modified nucleotide
  modified_base 13: mod_base = OTHER; note = 2'-O-methyl modified nucleotide
  modified_base 14: mod_base = OTHER; note = 2'-O-methyl modified nucleotide
  modified_base 15: mod_base = OTHER; note = 2'-O-methyl modified nucleotide
  modified_base 16: mod_base = OTHER; note = 2'-O-methyl modified nucleotide
  modified_base 17: mod_base = OTHER; note = 2'-O-methyl modified nucleotide
  modified_base 18: mod_base = OTHER; note = 2'-O-methyl modified nucleotide
  modified_base 19: mod_base = OTHER; note = 2'-O-methyl modified nucleotide
cgtcattctggtagttata

SEQ ID NO: 1015 - RNA, 19 nt, synthetic construct
  source 1..19: mol_type = other RNA
  modified_base 1: mod_base = OTHER; note = 2'-O-methyl modified nucleotide with phosphorothioate linkage
  modified_base 2: mod_base = OTHER; note = 2'-O-methyl modified nucleotide with phosphorothioate linkage
  modified_base 3: mod_base = OTHER; note = 2'-O-methyl modified nucleotide
  modified_base 4: mod_base = OTHER; note = 2'-O-methyl modified nucleotide
  modified_base 5: mod_base = OTHER; note = 2'-fluoro modified nucleotide
  modified_base 6: mod_base = OTHER; note = 2'-O-methyl modified nucleotide
  modified_base 7: mod_base = OTHER; note = 2'-fluoro modified nucleotide
  modified_base 8: mod_base = OTHER; note = 2'-fluoro modified nucleotide
  modified_base 9: mod_base = OTHER; note = 2'-fluoro modified nucleotide
  modified_base 10: mod_base = OTHER; note = 2'-O-methyl modified nucleotide
  modified_base 11: mod_base = OTHER; note = 2'-O-methyl modified nucleotide
  modified_base 12: mod_base = OTHER; note = 2'-O-methyl modified nucleotide
  modified_base 13: mod_base = OTHER; note = 2'-O-methyl modified nucleotide
  modified_base 14: mod_base = OTHER; note = 2'-O-methyl modified nucleotide
  modified_base 15: mod_base = OTHER; note = 2'-O-methyl modified nucleotide
  modified_base 16: mod_base = OTHER; note = 2'-O-methyl modified nucleotide
  modified_base 17: mod_base = OTHER; note = 2'-O-methyl modified nucleotide
  modified_base 18: mod_base = OTHER; note = 2'-O-methyl modified nucleotide
  modified_base 19: mod_base = OTHER; note = 2'-O-methyl modified nucleotide
cattctggtagttatgtta

SEQ ID NO: 1016 - RNA, 19 nt, synthetic construct
  source 1..19: mol_type = other RNA
  modified_base 1: mod_base = OTHER; note = 2'-O-methyl modified nucleotide with phosphorothioate linkage
  modified_base 2: mod_base = OTHER; note = 2'-O-methyl modified nucleotide with phosphorothioate linkage
  modified_base 3: mod_base = OTHER; note = 2'-O-methyl modified nucleotide
  modified_base 4: mod_base = OTHER; note = 2'-O-methyl modified nucleotide
  modified_base 5: mod_base = OTHER; note = 2'-fluoro modified nucleotide
  modified_base 6: mod_base = OTHER; note = 2'-O-methyl modified nucleotide
  modified_base 7: mod_base = OTHER; note = 2'-fluoro modified nucleotide
  modified_base 8: mod_base = OTHER; note = 2'-fluoro modified nucleotide
  modified_base 9: mod_base = OTHER; note = 2'-fluoro modified nucleotide
  modified_base 10: mod_base = OTHER; note = 2'-O-methyl modified nucleotide
  modified_base 11: mod_base = OTHER; note = 2'-O-methyl modified nucleotide
  modified_base 12: mod_base = OTHER; note = 2'-O-methyl modified nucleotide
  modified_base 13: mod_base = OTHER; note = 2'-O-methyl modified nucleotide
  modified_base 14: mod_base = OTHER; note = 2'-O-methyl modified nucleotide
  modified_base 15: mod_base = OTHER; note = 2'-O-methyl modified nucleotide
  modified_base 16: mod_base = OTHER; note = 2'-O-methyl modified nucleotide
  modified_base 17: mod_base = OTHER; note = 2'-O-methyl modified nucleotide
  modified_base 18: mod_base = OTHER; note = 2'-O-methyl modified nucleotide
  modified_base 19: mod_base = OTHER; note = 2'-O-methyl modified nucleotide
ggtgatcatcgccatagta

SEQ ID NO: 1017 - RNA, 19 nt, synthetic construct
  source 1..19: mol_type = other RNA
  modified_base 1: mod_base = OTHER; note = 2'-O-methyl modified nucleotide with phosphorothioate linkage
  modified_base 2: mod_base = OTHER; note = 2'-O-methyl modified nucleotide with phosphorothioate linkage
  modified_base 3: mod_base = OTHER; note = 2'-O-methyl modified nucleotide
  modified_base 4: mod_base = OTHER; note = 2'-O-methyl modified nucleotide
  modified_base 5: mod_base = OTHER; note = 2'-fluoro modified nucleotide
  modified_base 6: mod_base = OTHER; note = 2'-O-methyl modified nucleotide
  modified_base 7: mod_base = OTHER; note = 2'-fluoro modified nucleotide
  modified_base 8: mod_base = OTHER; note = 2'-fluoro modified nucleotide
  modified_base 9: mod_base = OTHER; note = 2'-fluoro modified nucleotide
  modified_base 10: mod_base = OTHER; note = 2'-O-methyl modified nucleotide
  modified_base 11: mod_base = OTHER; note = 2'-O-methyl modified nucleotide
  modified_base 12: mod_base = OTHER; note = 2'-O-methyl modified nucleotide
  modified_base 13: mod_base = OTHER; note = 2'-O-methyl modified nucleotide
  modified_base 14: mod_base = OTHER; note = 2'-O-methyl modified nucleotide
  modified_base 15: mod_base = OTHER; note = 2'-O-methyl modified nucleotide
  modified_base 16: mod_base = OTHER; note = 2'-O-methyl modified nucleotide
  modified_base 17: mod_base = OTHER; note = 2'-O-methyl modified nucleotide
  modified_base 18: mod_base = OTHER; note = 2'-O-methyl modified nucleotide
  modified_base 19: mod_base = OTHER; note = 2'-O-methyl modified nucleotide
ggcccagtacggtatcata

SEQ ID NO: 1018 - RNA, 19 nt, synthetic construct
  source 1..19: mol_type = other RNA
  modified_base 1: mod_base = OTHER; note = 2'-O-methyl modified nucleotide with phosphorothioate linkage
  modified_base 2: mod_base = OTHER; note = 2'-O-methyl modified nucleotide with phosphorothioate linkage
  modified_base 3: mod_base = OTHER; note = 2'-O-methyl modified nucleotide
  modified_base 4: mod_base = OTHER; note = 2'-O-methyl modified nucleotide
  modified_base 5: mod_base = OTHER; note = 2'-fluoro modified nucleotide
  modified_base 6: mod_base = OTHER; note = 2'-O-methyl modified nucleotide
  modified_base 7: mod_base = OTHER; note = 2'-fluoro modified nucleotide
  modified_base 8: mod_base = OTHER; note = 2'-fluoro modified nucleotide
  modified_base 9: mod_base = OTHER; note = 2'-fluoro modified nucleotide
  modified_base 10: mod_base = OTHER; note = 2'-O-methyl modified nucleotide
  modified_base 11: mod_base = OTHER; note = 2'-O-methyl modified nucleotide
  modified_base 12: mod_base = OTHER; note = 2'-O-methyl modified nucleotide
  modified_base 13: mod_base = OTHER; note = 2'-O-methyl modified nucleotide
  modified_base 14: mod_base = OTHER; note = 2'-O-methyl modified nucleotide
  modified_base 15: mod_base = OTHER; note = 2'-O-methyl modified nucleotide
  modified_base 16: mod_base = OTHER; note = 2'-O-methyl modified nucleotide
  modified_base 17: mod_base = OTHER; note = 2'-O-methyl modified nucleotide
  modified_base 18: mod_base = OTHER; note = 2'-O-methyl modified nucleotide
  modified_base 19: mod_base = OTHER; note = 2'-O-methyl modified nucleotide
catctacagcaaaggaata

SEQ ID NO: 1019 - RNA, 19 nt, synthetic construct
  source 1..19: mol_type = other RNA
  modified_base 1: mod_base = OTHER; note = 2'-O-methyl modified nucleotide with phosphorothioate linkage
  modified_base 2: mod_base = OTHER; note = 2'-O-methyl modified nucleotide with phosphorothioate linkage
  modified_base 3: mod_base = OTHER; note = 2'-O-methyl modified nucleotide
  modified_base 4: mod_base = OTHER; note = 2'-O-methyl modified nucleotide
  modified_base 5: mod_base = OTHER; note = 2'-fluoro modified nucleotide
  modified_base 6: mod_base = OTHER; note = 2'-O-methyl modified nucleotide
  modified_base 7: mod_base = OTHER; note = 2'-fluoro modified nucleotide
  modified_base 8: mod_base = OTHER; note = 2'-fluoro modified nucleotide
  modified_base 9: mod_base = OTHER; note = 2'-fluoro modified nucleotide
  modified_base 10: mod_base = OTHER; note = 2'-O-methyl modified nucleotide
  modified_base 11: mod_base = OTHER; note = 2'-O-methyl modified nucleotide
  modified_base 12: mod_base = OTHER; note = 2'-O-methyl modified nucleotide
  modified_base 13: mod_base = OTHER; note = 2'-O-methyl modified nucleotide
  modified_base 14: mod_base = OTHER; note = 2'-O-methyl modified nucleotide
  modified_base 15: mod_base = OTHER; note = 2'-O-methyl modified nucleotide
  modified_base 16: mod_base = OTHER; note = 2'-O-methyl modified nucleotide
  modified_base 17: mod_base = OTHER; note = 2'-O-methyl modified nucleotide
  modified_base 18: mod_base = OTHER; note = 2'-O-methyl modified nucleotide
  modified_base 19: mod_base = OTHER; note = 2'-O-methyl modified nucleotide
ctacgacggagatcttaaa

SEQ ID NO: 1020 - RNA, 19 nt, synthetic construct
  source 1..19: mol_type = other RNA
  modified_base 1: mod_base = OTHER; note = 2'-O-methyl modified nucleotide with phosphorothioate linkage
  modified_base 2: mod_base = OTHER; note = 2'-O-methyl modified nucleotide with phosphorothioate linkage
  modified_base 3: mod_base = OTHER; note = 2'-O-methyl modified nucleotide
  modified_base 4: mod_base = OTHER; note = 2'-O-methyl modified nucleotide
  modified_base 5: mod_base = OTHER; note = 2'-fluoro modified nucleotide
  modified_base 6: mod_base = OTHER; note = 2'-O-methyl modified nucleotide
  modified_base 7: mod_base = OTHER; note = 2'-fluoro modified nucleotide
  modified_base 8: mod_base = OTHER; note = 2'-fluoro modified nucleotide
  modified_base 9: mod_base = OTHER; note = 2'-fluoro modified nucleotide
  modified_base 10: mod_base = OTHER; note = 2'-O-methyl modified nucleotide
  modified_base 11: mod_base = OTHER; note = 2'-O-methyl modified nucleotide
  modified_base 12: mod_base = OTHER; note = 2'-O-methyl modified nucleotide
  modified_base 13: mod_base = OTHER; note = 2'-O-methyl modified nucleotide
  modified_base 14: mod_base = OTHER; note = 2'-O-methyl modified nucleotide
  modified_base 15: mod_base = OTHER; note = 2'-O-methyl modified nucleotide
  modified_base 16: mod_base = OTHER; note = 2'-O-methyl modified nucleotide
  modified_base 17: mod_base = OTHER; note = 2'-O-methyl modified nucleotide
  modified_base 18: mod_base = OTHER; note = 2'-O-methyl modified nucleotide
  modified_base 19: mod_base = OTHER; note = 2'-O-methyl modified nucleotide
cctacaaaggcattatgta

SEQ ID NO: 1021 - RNA, 19 nt, synthetic construct
  source 1..19: mol_type = other RNA
  modified_base 1: mod_base = OTHER; note = 2'-O-methyl modified nucleotide with phosphorothioate linkage
  modified_base 2: mod_base = OTHER; note = 2'-O-methyl modified nucleotide with phosphorothioate linkage
  modified_base 3: mod_base = OTHER; note = 2'-O-methyl modified nucleotide
  modified_base 4: mod_base = OTHER; note = 2'-O-methyl modified nucleotide
  modified_base 5: mod_base = OTHER; note = 2'-fluoro modified nucleotide
  modified_base 6: mod_base = OTHER; note = 2'-O-methyl modified nucleotide
  modified_base 7: mod_base = OTHER; note = 2'-fluoro modified nucleotide
  modified_base 8: mod_base = OTHER; note = 2'-fluoro modified nucleotide
  modified_base 9: mod_base = OTHER; note = 2'-fluoro modified nucleotide
  modified_base 10: mod_base = OTHER; note = 2'-O-methyl modified nucleotide
  modified_base 11: mod_base = OTHER; note = 2'-O-methyl modified nucleotide
  modified_base 12: mod_base = OTHER; note = 2'-O-methyl modified nucleotide
  modified_base 13: mod_base = OTHER; note = 2'-O-methyl modified nucleotide
  modified_base 14: mod_base = OTHER; note = 2'-O-methyl modified nucleotide
  modified_base 15: mod_base = OTHER; note = 2'-O-methyl modified nucleotide
  modified_base 16: mod_base = OTHER; note = 2'-O-methyl modified nucleotide
  modified_base 17: mod_base = OTHER; note = 2'-O-methyl modified nucleotide
  modified_base 18: mod_base = OTHER; note = 2'-O-methyl modified nucleotide
  modified_base 19: mod_base = OTHER; note = 2'-O-methyl modified nucleotide
ctacaaaggcattatgtta

SEQ ID NO: 1022 - RNA, 19 nt, synthetic construct
  source 1..19: mol_type = other RNA
  modified_base 1: mod_base = OTHER; note = 2'-O-methyl modified nucleotide with phosphorothioate linkage
  modified_base 2: mod_base = OTHER; note = 2'-O-methyl modified nucleotide with phosphorothioate linkage
  modified_base 3: mod_base = OTHER; note = 2'-O-methyl modified nucleotide
  modified_base 4: mod_base = OTHER; note = 2'-O-methyl modified nucleotide
  modified_base 5: mod_base = OTHER; note = 2'-fluoro modified nucleotide
  modified_base 6: mod_base = OTHER; note = 2'-O-methyl modified nucleotide
  modified_base 7: mod_base = OTHER; note = 2'-fluoro modified nucleotide
  modified_base 8: mod_base = OTHER; note = 2'-fluoro modified nucleotide
  modified_base 9: mod_base = OTHER; note = 2'-fluoro modified nucleotide
  modified_base 10: mod_base = OTHER; note = 2'-O-methyl modified nucleotide
  modified_base 11: mod_base = OTHER; note = 2'-O-methyl modified nucleotide
  modified_base 12: mod_base = OTHER; note = 2'-O-methyl modified nucleotide
  modified_base 13: mod_base = OTHER; note = 2'-O-methyl modified nucleotide
  modified_base 14: mod_base = OTHER; note = 2'-O-methyl modified nucleotide
  modified_base 15: mod_base = OTHER; note = 2'-O-methyl modified nucleotide
  modified_base 16: mod_base = OTHER; note = 2'-O-methyl modified nucleotide
  modified_base 17: mod_base = OTHER; note = 2'-O-methyl modified nucleotide
  modified_base 18: mod_base = OTHER; note = 2'-O-methyl modified nucleotide
  modified_base 19: mod_base = OTHER; note = 2'-O-methyl modified nucleotide
cactcgtcatggttctcaa

SEQ ID NO: 1023 - RNA, 19 nt, synthetic construct
  source 1..19: mol_type = other RNA
  modified_base 1: mod_base = OTHER; note = 2'-O-methyl modified nucleotide with phosphorothioate linkage
  modified_base 2: mod_base = OTHER; note = 2'-O-methyl modified nucleotide with phosphorothioate linkage
  modified_base 3: mod_base = OTHER; note = 2'-O-methyl modified nucleotide
  modified_base 4: mod_base = OTHER; note = 2'-O-methyl modified nucleotide
  modified_base 5: mod_base = OTHER; note = 2'-fluoro modified nucleotide
  modified_base 6: mod_base = OTHER; note = 2'-O-methyl modified nucleotide
  modified_base 7: mod_base = OTHER; note = 2'-fluoro modified nucleotide
  modified_base 8: mod_base = OTHER; note = 2'-fluoro modified nucleotide
  modified_base 9: mod_base = OTHER; note = 2'-fluoro modified nucleotide
  modified_base 10: mod_base = OTHER; note = 2'-O-methyl modified nucleotide
  modified_base 11: mod_base = OTHER; note = 2'-O-methyl modified nucleotide
  modified_base 12: mod_base = OTHER; note = 2'-O-methyl modified nucleotide
  modified_base 13: mod_base = OTHER; note = 2'-O-methyl modified nucleotide
  modified_base 14: mod_base = OTHER; note = 2'-O-methyl modified nucleotide
  modified_base 15: mod_base = OTHER; note = 2'-O-methyl modified nucleotide
  modified_base 16: mod_base = OTHER; note = 2'-O-methyl modified nucleotide
  modified_base 17: mod_base = OTHER; note = 2'-O-methyl modified nucleotide
  modified_base 18: mod_base = OTHER; note = 2'-O-methyl modified nucleotide
  modified_base 19: mod_base = OTHER; note = 2'-O-methyl modified nucleotide
caggcatgatcatcactta

SEQ ID NO: 1024 - RNA, 19 nt, synthetic construct
  source 1..19: mol_type = other RNA
  modified_base 1: mod_base = OTHER; note = 2'-O-methyl modified nucleotide with phosphorothioate linkage
  modified_base 2: mod_base = OTHER; note = 2'-O-methyl modified nucleotide with phosphorothioate linkage
  modified_base 3: mod_base = OTHER; note = 2'-O-methyl modified nucleotide
  modified_base 4: mod_base = OTHER; note = 2'-O-methyl modified nucleotide
  modified_base 5: mod_base = OTHER; note = 2'-fluoro modified nucleotide
  modified_base 6: mod_base = OTHER; note = 2'-O-methyl modified nucleotide
  modified_base 7: mod_base = OTHER; note = 2'-fluoro modified nucleotide
  modified_base 8: mod_base = OTHER; note = 2'-fluoro modified nucleotide
  modified_base 9: mod_base = OTHER; note = 2'-fluoro modified nucleotide
  modified_base 10: mod_base = OTHER; note = 2'-O-methyl modified nucleotide
  modified_base 11: mod_base = OTHER; note = 2'-O-methyl modified nucleotide
  modified_base 12: mod_base = OTHER; note = 2'-O-methyl modified nucleotide
  modified_base 13: mod_base = OTHER; note = 2'-O-methyl modified nucleotide
  modified_base 14: mod_base = OTHER; note = 2'-O-methyl modified nucleotide
  modified_base 15: mod_base = OTHER; note = 2'-O-methyl modified nucleotide
  modified_base 16: mod_base = OTHER; note = 2'-O-methyl modified nucleotide
  modified_base 17: mod_base = OTHER; note = 2'-O-methyl modified nucleotide
  modified_base 18: mod_base = OTHER; note = 2'-O-methyl modified nucleotide
  modified_base 19: mod_base = OTHER; note = 2'-O-methyl modified nucleotide
ggcatgatcatcactttca

SEQ ID NO: 1025 - RNA, 19 nt, synthetic construct
  source 1..19: mol_type = other RNA
  modified_base 1: mod_base = OTHER; note = 2'-O-methyl modified nucleotide with phosphorothioate linkage
  modified_base 2: mod_base = OTHER; note = 2'-O-methyl modified nucleotide with phosphorothioate linkage
  modified_base 3: mod_base = OTHER; note = 2'-O-methyl modified nucleotide
  modified_base 4: mod_base = OTHER; note = 2'-O-methyl modified nucleotide
  modified_base 5: mod_base = OTHER; note = 2'-fluoro modified nucleotide
  modified_base 6: mod_base = OTHER; note = 2'-O-methyl modified nucleotide
  modified_base 7: mod_base = OTHER; note = 2'-fluoro modified nucleotide
  modified_base 8: mod_base = OTHER; note = 2'-fluoro modified nucleotide
  modified_base 9: mod_base = OTHER; note = 2'-fluoro modified nucleotide
  modified_base 10: mod_base = OTHER; note = 2'-O-methyl modified nucleotide
  modified_base 11: mod_base = OTHER; note = 2'-O-methyl modified nucleotide
  modified_base 12: mod_base = OTHER; note = 2'-O-methyl modified nucleotide
  modified_base 13: mod_base = OTHER; note = 2'-O-methyl modified nucleotide
  modified_base 14: mod_base = OTHER; note = 2'-O-methyl modified nucleotide
  modified_base 15: mod_base = OTHER; note = 2'-O-methyl modified nucleotide
  modified_base 16: mod_base = OTHER; note = 2'-O-methyl modified nucleotide
  modified_base 17: mod_base = OTHER; note = 2'-O-methyl modified nucleotide
  modified_base 18: mod_base = OTHER; note = 2'-O-methyl modified nucleotide
  modified_base 19: mod_base = OTHER; note = 2'-O-methyl modified nucleotide
gctctcttccgactaaata

SEQ ID NO: 1026 - RNA, 19 nt, synthetic construct
  source 1..19: mol_type = other RNA
  modified_base 1: mod_base = OTHER; note = 2'-O-methyl modified nucleotide with phosphorothioate linkage
  modified_base 2: mod_base = OTHER; note = 2'-O-methyl modified nucleotide with phosphorothioate linkage
  modified_base 3: mod_base = OTHER; note = 2'-O-methyl modified nucleotide
  modified_base 4: mod_base = OTHER; note = 2'-O-methyl modified nucleotide
  modified_base 5: mod_base = OTHER; note = 2'-fluoro modified nucleotide
  modified_base 6: mod_base = OTHER; note = 2'-O-methyl modified nucleotide
  modified_base 7: mod_base = OTHER; note = 2'-fluoro modified nucleotide
  modified_base 8: mod_base = OTHER; note = 2'-fluoro modified nucleotide
  modified_base 9: mod_base = OTHER; note = 2'-fluoro modified nucleotide
  modified_base 10: mod_base = OTHER; note = 2'-O-methyl modified nucleotide
  modified_base 11: mod_base = OTHER; note = 2'-O-methyl modified nucleotide
  modified_base 12: mod_base = OTHER; note = 2'-O-methyl modified nucleotide
  modified_base 13: mod_base = OTHER; note = 2'-O-methyl modified nucleotide
  modified_base 14: mod_base = OTHER; note = 2'-O-methyl modified nucleotide
  modified_base 15: mod_base = OTHER; note = 2'-O-methyl modified nucleotide
  modified_base 16: mod_base = OTHER; note = 2'-O-methyl modified nucleotide
  modified_base 17: mod_base = OTHER; note = 2'-O-methyl modified nucleotide
  modified_base 18: mod_base = OTHER; note = 2'-O-methyl modified nucleotide
  modified_base 19: mod_base = OTHER; note = 2'-O-methyl modified nucleotide
cgtccaactctgttctaca

SEQ ID NO: 1027 - RNA, 19 nt, synthetic construct
  source 1..19: mol_type = other RNA
  modified_base 1: mod_base = OTHER; note = 2'-O-methyl modified nucleotide with phosphorothioate linkage
  modified_base 2: mod_base = OTHER; note = 2'-O-methyl modified nucleotide with phosphorothioate linkage
  modified_base 3: mod_base = OTHER; note = 2'-O-methyl modified nucleotide
  modified_base 4: mod_base = OTHER; note = 2'-O-methyl modified nucleotide
  modified_base 5: mod_base = OTHER; note = 2'-fluoro modified nucleotide
  modified_base 6: mod_base = OTHER; note = 2'-O-methyl modified nucleotide
  modified_base 7: mod_base = OTHER; note = 2'-fluoro modified nucleotide
  modified_base 8: mod_base = OTHER; note = 2'-fluoro modified nucleotide
  modified_base 9: mod_base = OTHER; note = 2'-fluoro modified nucleotide
  modified_base 10: mod_base = OTHER; note = 2'-O-methyl modified nucleotide
  modified_base 11: mod_base = OTHER; note = 2'-O-methyl modified nucleotide
  modified_base 12: mod_base = OTHER; note = 2'-O-methyl modified nucleotide
  modified_base 13: mod_base = OTHER; note = 2'-O-methyl modified nucleotide
  modified_base 14: mod_base = OTHER; note = 2'-O-methyl modified nucleotide
  modified_base 15: mod_base = OTHER; note = 2'-O-methyl modified nucleotide
  modified_base 16: mod_base = OTHER; note = 2'-O-methyl modified nucleotide
  modified_base 17: mod_base = OTHER; note = 2'-O-methyl modified nucleotide
  modified_base 18: mod_base = OTHER; note = 2'-O-methyl modified nucleotide
  modified_base 19: mod_base = OTHER; note = 2'-O-methyl modified nucleotide
ccaactctgttctaccata

SEQ ID NO: 1028 - RNA, 19 nt, synthetic construct
  source 1..19: mol_type = other RNA
  modified_base 1: mod_base = OTHER; note = 2'-O-methyl modified nucleotide with phosphorothioate linkage
  modified_base 2: mod_base = OTHER; note = 2'-O-methyl modified nucleotide with phosphorothioate linkage
  modified_base 3: mod_base = OTHER; note = 2'-O-methyl modified nucleotide
  modified_base 4: mod_base = OTHER; note = 2'-O-methyl modified nucleotide
  modified_base 5: mod_base = OTHER; note = 2'-fluoro modified nucleotide
  modified_base 6: mod_base = OTHER; note = 2'-O-methyl modified nucleotide
  modified_base 7: mod_base = OTHER; note = 2'-fluoro modified nucleotide
  modified_base 8: mod_base = OTHER; note = 2'-fluoro modified nucleotide
  modified_base 9: mod_base = OTHER; note = 2'-fluoro modified nucleotide
  modified_base 10: mod_base = OTHER; note = 2'-O-methyl modified nucleotide
  modified_base 11: mod_base = OTHER; note = 2'-O-methyl modified nucleotide
  modified_base 12: mod_base = OTHER; note = 2'-O-methyl modified nucleotide
  modified_base 13: mod_base = OTHER; note = 2'-O-methyl modified nucleotide
  modified_base 14: mod_base = OTHER; note = 2'-O-methyl modified nucleotide
  modified_base 15: mod_base = OTHER; note = 2'-O-methyl modified nucleotide
  modified_base 16: mod_base = OTHER; note = 2'-O-methyl modified nucleotide
  modified_base 17: mod_base = OTHER; note = 2'-O-methyl modified nucleotide
  modified_base 18: mod_base = OTHER; note = 2'-O-methyl modified nucleotide
  modified_base 19: mod_base = OTHER; note = 2'-O-methyl modified nucleotide
ccggtgctatttgaaaata

SEQ ID NO: 1029 - RNA, 19 nt, synthetic construct
  source 1..19: mol_type = other RNA
  modified_base 1: mod_base = OTHER; note = 2'-O-methyl modified nucleotide with phosphorothioate linkage
  modified_base 2: mod_base = OTHER; note = 2'-O-methyl modified nucleotide with phosphorothioate linkage
  modified_base 3: mod_base = OTHER; note = 2'-O-methyl modified nucleotide
  modified_base 4: mod_base = OTHER; note = 2'-O-methyl modified nucleotide
  modified_base 5: mod_base = OTHER; note = 2'-fluoro modified nucleotide
  modified_base 6: mod_base = OTHER; note = 2'-O-methyl modified nucleotide
  modified_base 7: mod_base = OTHER; note = 2'-fluoro modified nucleotide
  modified_base 8: mod_base = OTHER; note = 2'-fluoro modified nucleotide
  modified_base 9: mod_base = OTHER; note = 2'-fluoro modified nucleotide
  modified_base 10: mod_base = OTHER; note = 2'-O-methyl modified nucleotide
  modified_base 11: mod_base = OTHER; note = 2'-O-methyl modified nucleotide
  modified_base 12: mod_base = OTHER; note = 2'-O-methyl modified nucleotide
  modified_base 13: mod_base = OTHER; note = 2'-O-methyl modified nucleotide
  modified_base 14: mod_base = OTHER; note = 2'-O-methyl modified nucleotide
  modified_base 15: mod_base = OTHER; note = 2'-O-methyl modified nucleotide
  modified_base 16: mod_base = OTHER; note = 2'-O-methyl modified nucleotide
  modified_base 17: mod_base = OTHER; note = 2'-O-methyl modified nucleotide
  modified_base 18: mod_base = OTHER; note = 2'-O-methyl modified nucleotide
  modified_base 19: mod_base = OTHER; note = 2'-O-methyl modified nucleotide
gaacctcagcattgtgata

SEQ ID NO: 1030 - RNA, 19 nt, synthetic construct
  source 1..19: mol_type = other RNA
  modified_base 1: mod_base = OTHER; note = 2'-O-methyl modified nucleotide with phosphorothioate linkage
  modified_base 2: mod_base = OTHER; note = 2'-O-methyl modified nucleotide with phosphorothioate linkage
  modified_base 3: mod_base = OTHER; note = 2'-O-methyl modified nucleotide
  modified_base 4: mod_base = OTHER; note = 2'-O-methyl modified nucleotide
  modified_base 5: mod_base = OTHER; note = 2'-fluoro modified nucleotide
  modified_base 6: mod_base = OTHER; note = 2'-O-methyl modified nucleotide
  modified_base 7: mod_base = OTHER; note = 2'-fluoro modified nucleotide
  modified_base 8: mod_base = OTHER; note = 2'-fluoro modified nucleotide
  modified_base 9: mod_base = OTHER; note = 2'-fluoro modified nucleotide
  modified_base 10: mod_base = OTHER; note = 2'-O-methyl modified nucleotide
  modified_base 11: mod_base = OTHER; note = 2'-O-methyl modified nucleotide
  modified_base 12: mod_base = OTHER; note = 2'-O-methyl modified nucleotide
  modified_base 13: mod_base = OTHER; note = 2'-O-methyl modified nucleotide
  modified_base 14: mod_base = OTHER; note = 2'-O-methyl modified nucleotide
  modified_base 15: mod_base = OTHER; note = 2'-O-methyl modified nucleotide
  modified_base 16: mod_base = OTHER; note = 2'-O-methyl modified nucleotide
  modified_base 17: mod_base = OTHER; note = 2'-O-methyl modified nucleotide
  modified_base 18: mod_base = OTHER; note = 2'-O-methyl modified nucleotide
  modified_base 19: mod_base = OTHER; note = 2'-O-methyl modified nucleotide
ctgaagtcattggaccaca

SEQ ID NO: 1031 - RNA, 19 nt, synthetic construct
  source 1..19: mol_type = other RNA
  modified_base 1: mod_base = OTHER; note = 2'-O-methyl modified nucleotide with phosphorothioate linkage
  modified_base 2: mod_base = OTHER; note = 2'-O-methyl modified nucleotide with phosphorothioate linkage
  modified_base 3: mod_base = OTHER; note = 2'-O-methyl modified nucleotide
  modified_base 4: mod_base = OTHER; note = 2'-O-methyl modified nucleotide
  modified_base 5: mod_base = OTHER; note = 2'-fluoro modified nucleotide
  modified_base 6: mod_base = OTHER; note = 2'-O-methyl modified nucleotide
  modified_base 7: mod_base = OTHER; note = 2'-fluoro modified nucleotide
  modified_base 8: mod_base = OTHER; note = 2'-fluoro modified nucleotide
  modified_base 9: mod_base = OTHER; note = 2'-fluoro modified nucleotide
  modified_base 10: mod_base = OTHER; note = 2'-O-methyl modified nucleotide
  modified_base 11: mod_base = OTHER; note = 2'-O-methyl modified nucleotide
  modified_base 12: mod_base = OTHER; note = 2'-O-methyl modified nucleotide
  modified_base 13: mod_base = OTHER; note = 2'-O-methyl modified nucleotide
  modified_base 14: mod_base = OTHER; note = 2'-O-methyl modified nucleotide
  modified_base 15: mod_base = OTHER; note = 2'-O-methyl modified nucleotide
  modified_base 16: mod_base = OTHER; note = 2'-O-methyl modified nucleotide
  modified_base 17: mod_base = OTHER; note = 2'-O-methyl modified nucleotide
  modified_base 18: mod_base = OTHER; note = 2'-O-methyl modified nucleotide
  modified_base 19: mod_base = OTHER; note = 2'-O-methyl modified nucleotide
gttctcattccttgcacca

SEQ ID NO: 1032 - RNA, 19 nt, synthetic construct
  source 1..19: mol_type = other RNA
  modified_base 1: mod_base = OTHER; note = 2'-O-methyl modified nucleotide with phosphorothioate linkage
  modified_base 2: mod_base = OTHER; note = 2'-O-methyl modified nucleotide with phosphorothioate linkage
  modified_base 3: mod_base = OTHER; note = 2'-O-methyl modified nucleotide
  modified_base 4: mod_base = OTHER; note = 2'-O-methyl modified nucleotide
  modified_base 5: mod_base = OTHER; note = 2'-fluoro modified nucleotide
  modified_base 6: mod_base = OTHER; note = 2'-O-methyl modified nucleotide
  modified_base 7: mod_base = OTHER; note = 2'-fluoro modified nucleotide
  modified_base 8: mod_base = OTHER; note = 2'-fluoro modified nucleotide
  modified_base 9: mod_base = OTHER; note = 2'-fluoro modified nucleotide
  modified_base 10: mod_base = OTHER; note = 2'-O-methyl modified nucleotide
  modified_base 11: mod_base = OTHER; note = 2'-O-methyl modified nucleotide
  modified_base 12: mod_base = OTHER; note = 2'-O-methyl modified nucleotide
  modified_base 13: mod_base = OTHER; note = 2'-O-methyl modified nucleotide
  modified_base 14: mod_base = OTHER; note = 2'-O-methyl modified nucleotide
  modified_base 15: mod_base = OTHER; note = 2'-O-methyl modified nucleotide
  modified_base 16: mod_base = OTHER; note = 2'-O-methyl modified nucleotide
  modified_base 17: mod_base = OTHER; note = 2'-O-methyl modified nucleotide
  modified_base 18: mod_base = OTHER; note = 2'-O-methyl modified nucleotide
  modified_base 19: mod_base = OTHER; note = 2'-O-methyl modified nucleotide
ttctcattccttgcaccaa

SEQ ID NO: 1033 - RNA, 19 nt, synthetic construct
  source 1..19: mol_type = other RNA
  modified_base 1: mod_base = OTHER; note = 2'-O-methyl modified nucleotide with phosphorothioate linkage
  modified_base 2: mod_base = OTHER; note = 2'-O-methyl modified nucleotide with phosphorothioate linkage
  modified_base 3: mod_base = OTHER; note = 2'-O-methyl modified nucleotide
  modified_base 4: mod_base = OTHER; note = 2'-O-methyl modified nucleotide
  modified_base 5: mod_base = OTHER; note = 2'-fluoro modified nucleotide
  modified_base 6: mod_base = OTHER; note = 2'-O-methyl modified nucleotide
  modified_base 7: mod_base = OTHER; note = 2'-fluoro modified nucleotide
  modified_base 8: mod_base = OTHER; note = 2'-fluoro modified nucleotide
  modified_base 9: mod_base = OTHER; note = 2'-fluoro modified nucleotide
  modified_base 10: mod_base = OTHER; note = 2'-O-methyl modified nucleotide
  modified_base 11: mod_base = OTHER; note = 2'-O-methyl modified nucleotide
  modified_base 12: mod_base = OTHER; note = 2'-O-methyl modified nucleotide
  modified_base 13: mod_base = OTHER; note = 2'-O-methyl modified nucleotide
  modified_base 14: mod_base = OTHER; note = 2'-O-methyl modified nucleotide
  modified_base 15: mod_base = OTHER; note = 2'-O-methyl modified nucleotide
  modified_base 16: mod_base = OTHER; note = 2'-O-methyl modified nucleotide
  modified_base 17: mod_base = OTHER; note = 2'-O-methyl modified nucleotide
  modified_base 18: mod_base = OTHER; note = 2'-O-methyl modified nucleotide
  modified_base 19: mod_base = OTHER; note = 2'-O-methyl modified nucleotide
ctcattccttgcaccataa

SEQ ID NO: 1034 - RNA, 19 nt, synthetic construct
  source 1..19: mol_type = other RNA
  modified_base 1: mod_base = OTHER; note = 2'-O-methyl modified nucleotide with phosphorothioate linkage
  modified_base 2: mod_base = OTHER; note = 2'-O-methyl modified nucleotide with phosphorothioate linkage
  modified_base 3: mod_base = OTHER; note = 2'-O-methyl modified nucleotide
  modified_base 4: mod_base = OTHER; note = 2'-O-methyl modified nucleotide
  modified_base 5: mod_base = OTHER; note = 2'-fluoro modified nucleotide
  modified_base 6: mod_base = OTHER; note = 2'-O-methyl modified nucleotide
  modified_base 7: mod_base = OTHER; note = 2'-fluoro modified nucleotide
  modified_base 8: mod_base = OTHER; note = 2'-fluoro modified nucleotide
  modified_base 9: mod_base = OTHER; note = 2'-fluoro modified nucleotide
  modified_base 10: mod_base = OTHER; note = 2'-O-methyl modified nucleotide
  modified_base 11: mod_base = OTHER; note = 2'-O-methyl modified nucleotide
  modified_base 12: mod_base = OTHER; note = 2'-O-methyl modified nucleotide
  modified_base 13: mod_base = OTHER; note = 2'-O-methyl modified nucleotide
  modified_base 14: mod_base = OTHER; note = 2'-O-methyl modified nucleotide
  modified_base 15: mod_base = OTHER; note = 2'-O-methyl modified nucleotide
  modified_base 16: mod_base = OTHER; note = 2'-O-methyl modified nucleotide
  modified_base 17: mod_base = OTHER; note = 2'-O-methyl modified nucleotide
  modified_base 18: mod_base = OTHER; note = 2'-O-methyl modified nucleotide
  modified_base 19: mod_base = OTHER; note = 2'-O-methyl modified nucleotide
ttgcaccatagggatcgta

SEQ ID NO: 1035 - RNA, 19 nt, synthetic construct
  source 1..19: mol_type = other RNA
  modified_base 1: mod_base = OTHER; note = 2'-O-methyl modified nucleotide with phosphorothioate linkage
  modified_base 2: mod_base = OTHER; note = 2'-O-methyl modified nucleotide with phosphorothioate linkage
  modified_base 3: mod_base = OTHER; note = 2'-O-methyl modified nucleotide
  modified_base 4: mod_base = OTHER; note = 2'-O-methyl modified nucleotide
  modified_base 5: mod_base = OTHER; note = 2'-fluoro modified nucleotide
  modified_base 6: mod_base = OTHER; note = 2'-O-methyl modified nucleotide
  modified_base 7: mod_base = OTHER; note = 2'-fluoro modified nucleotide
  modified_base 8: mod_base = OTHER; note = 2'-fluoro modified nucleotide
  modified_base 9: mod_base = OTHER; note = 2'-fluoro modified nucleotide
  modified_base 10: mod_base = OTHER; note = 2'-O-methyl modified nucleotide
  modified_base 11: mod_base = OTHER; note = 2'-O-methyl modified nucleotide
  modified_base 12: mod_base = OTHER; note = 2'-O-methyl modified nucleotide
  modified_base 13: mod_base = OTHER; note = 2'-O-methyl modified nucleotide
  modified_base 14: mod_base = OTHER; note = 2'-O-methyl modified nucleotide
  modified_base 15: mod_base = OTHER; note = 2'-O-methyl modified nucleotide
  modified_base 16: mod_base = OTHER; note = 2'-O-methyl modified nucleotide
  modified_base 17: mod_base = OTHER; note = 2'-O-methyl modified nucleotide
  modified_base 18: mod_base = OTHER; note = 2'-O-methyl modified nucleotide
  modified_base 19: mod_base = OTHER; note = 2'-O-methyl modified nucleotide
tgcaccatagggatcgtca

SEQ ID NO: 1036 - RNA, 19 nt, synthetic construct
  source 1..19: mol_type = other RNA
  modified_base 1: mod_base = OTHER; note = 2'-O-methyl modified nucleotide with phosphorothioate linkage
  modified_base 2: mod_base = OTHER; note = 2'-O-methyl modified nucleotide with phosphorothioate linkage
  modified_base 3: mod_base = OTHER; note = 2'-O-methyl modified nucleotide
  modified_base 4: mod_base = OTHER; note = 2'-O-methyl modified nucleotide
  modified_base 5: mod_base = OTHER; note = 2'-fluoro modified nucleotide
  modified_base 6: mod_base = OTHER; note = 2'-O-methyl modified nucleotide
  modified_base 7: mod_base = OTHER; note = 2'-fluoro modified nucleotide
  modified_base 8: mod_base = OTHER; note = 2'-fluoro modified nucleotide
  modified_base 9: mod_base = OTHER; note = 2'-fluoro modified nucleotide
  modified_base 10: mod_base = OTHER; note = 2'-O-methyl modified nucleotide
  modified_base 11: mod_base = OTHER; note = 2'-O-methyl modified nucleotide
  modified_base 12: mod_base = OTHER; note = 2'-O-methyl modified nucleotide
  modified_base 13: mod_base = OTHER; note = 2'-O-methyl modified nucleotide
  modified_base 14: mod_base = OTHER; note = 2'-O-methyl modified nucleotide
  modified_base 15: mod_base = OTHER; note = 2'-O-methyl modified nucleotide
  modified_base 16: mod_base = OTHER; note = 2'-O-methyl modified nucleotide
  modified_base 17: mod_base = OTHER; note = 2'-O-methyl modified nucleotide
  modified_base 18: mod_base = OTHER; note = 2'-O-methyl modified nucleotide
  modified_base 19: mod_base = OTHER; note = 2'-O-methyl modified nucleotide
tcctctacatgattttcca

SEQ ID NO: 1037 - RNA, 19 nt, synthetic construct
  source 1..19: mol_type = other RNA
  modified_base 1: mod_base = OTHER; note = 2'-O-methyl modified nucleotide with phosphorothioate linkage
  modified_base 2: mod_base = OTHER; note = 2'-O-methyl modified nucleotide with phosphorothioate linkage
  modified_base 3: mod_base = OTHER; note = 2'-O-methyl modified nucleotide
  modified_base 4: mod_base = OTHER; note = 2'-O-methyl modified nucleotide
  modified_base 5: mod_base = OTHER; note = 2'-fluoro modified nucleotide
  modified_base 6: mod_base = OTHER; note = 2'-O-methyl modified nucleotide
  modified_base 7: mod_base = OTHER; note = 2'-fluoro modified nucleotide
  modified_base 8: mod_base = OTHER; note = 2'-fluoro modified nucleotide
  modified_base 9: mod_base = OTHER; note = 2'-fluoro modified nucleotide
  modified_base 10: mod_base = OTHER; note = 2'-O-methyl modified nucleotide
  modified_base 11: mod_base = OTHER; note = 2'-O-methyl modified nucleotide
  modified_base 12: mod_base = OTHER; note = 2'-O-methyl modified nucleotide
  modified_base 13: mod_base = OTHER; note = 2'-O-methyl modified nucleotide
  modified_base 14: mod_base = OTHER; note = 2'-O-methyl modified nucleotide
  modified_base 15: mod_base = OTHER; note = 2'-O-methyl modified nucleotide
  modified_base 16: mod_base = OTHER; note = 2'-O-methyl modified nucleotide
  modified_base 17: mod_base = OTHER; note = 2'-O-methyl modified nucleotide
  modified_base 18: mod_base = OTHER; note = 2'-O-methyl modified nucleotide
  modified_base 19: mod_base = OTHER; note = 2'-O-methyl modified nucleotide
tctacatgattttccagca

SEQ ID NO: 1038 - RNA, 19 nt, synthetic construct
  source 1..19: mol_type = other RNA
  modified_base 1: mod_base = OTHER; note = 2'-O-methyl modified nucleotide with phosphorothioate linkage
  modified_base 2: mod_base = OTHER; note = 2'-O-methyl modified nucleotide with phosphorothioate linkage
  modified_base 3: mod_base = OTHER; note = 2'-O-methyl modified nucleotide
  modified_base 4: mod_base = OTHER; note = 2'-O-methyl modified nucleotide
  modified_base 5: mod_base = OTHER; note = 2'-fluoro modified nucleotide
  modified_base 6: mod_base = OTHER; note = 2'-O-methyl modified nucleotide
  modified_base 7: mod_base = OTHER; note = 2'-fluoro modified nucleotide
  modified_base 8: mod_base = OTHER; note = 2'-fluoro modified nucleotide
  modified_base 9: mod_base = OTHER; note = 2'-fluoro modified nucleotide
  modified_base 10: mod_base = OTHER; note = 2'-O-methyl modified nucleotide
  modified_base 11: mod_base = OTHER; note = 2'-O-methyl modified nucleotide
  modified_base 12: mod_base = OTHER; note = 2'-O-methyl modified nucleotide
  modified_base 13: mod_base = OTHER; note = 2'-O-methyl modified nucleotide
  modified_base 14: mod_base = OTHER; note = 2'-O-methyl modified nucleotide
  modified_base 15: mod_base = OTHER; note = 2'-O-methyl modified nucleotide
  modified_base 16: mod_base = OTHER; note = 2'-O-methyl modified nucleotide
  modified_base 17: mod_base = OTHER; note = 2'-O-methyl modified nucleotide
  modified_base 18: mod_base = OTHER; note = 2'-O-methyl modified nucleotide
  modified_base 19: mod_base = OTHER; note = 2'-O-methyl modified nucleotide
ggctgcaccatggagttca

SEQ ID NO: 1039 - RNA, 19 nt, synthetic construct
  source 1..19: mol_type = other RNA
  modified_base 1: mod_base = OTHER; note = 2'-O-methyl modified nucleotide with phosphorothioate linkage
  modified_base 2: mod_base = OTHER; note = 2'-O-methyl modified nucleotide with phosphorothioate linkage
  modified_base 3: mod_base = OTHER; note = 2'-O-methyl modified nucleotide
  modified_base 4: mod_base = OTHER; note = 2'-O-methyl modified nucleotide
  modified_base 5: mod_base = OTHER; note = 2'-fluoro modified nucleotide
  modified_base 6: mod_base = OTHER; note = 2'-O-methyl modified nucleotide
  modified_base 7: mod_base = OTHER; note = 2'-fluoro modified nucleotide
  modified_base 8: mod_base = OTHER; note = 2'-fluoro modified nucleotide
  modified_base 9: mod_base = OTHER; note = 2'-fluoro modified nucleotide
  modified_base 10: mod_base = OTHER; note = 2'-O-methyl modified nucleotide
  modified_base 11: mod_base = OTHER; note = 2'-O-methyl modified nucleotide
  modified_base 12: mod_base = OTHER; note = 2'-O-methyl modified nucleotide
  modified_base 13: mod_base = OTHER; note = 2'-O-methyl modified nucleotide
  modified_base 14: mod_base = OTHER; note = 2'-O-methyl modified nucleotide
  modified_base 15: mod_base = OTHER; note = 2'-O-methyl modified nucleotide
  modified_base 16: mod_base = OTHER; note = 2'-O-methyl modified nucleotide
  modified_base 17: mod_base = OTHER; note = 2'-O-methyl modified nucleotide
  modified_base 18: mod_base = OTHER; note = 2'-O-methyl modified nucleotide
  modified_base 19: mod_base = OTHER; note = 2'-O-methyl modified nucleotide
ctcagcattgtgatgacca

SEQ ID NO: 1040 - RNA, 19 nt, synthetic construct
  source 1..19: mol_type = other RNA
  modified_base 1: mod_base = OTHER; note = 2'-O-methyl modified nucleotide with phosphorothioate linkage
  modified_base 2: mod_base = OTHER; note = 2'-O-methyl modified nucleotide with phosphorothioate linkage
  modified_base 3: mod_base = OTHER; note = 2'-O-methyl modified nucleotide
  modified_base 4: mod_base = OTHER; note = 2'-O-methyl modified nucleotide
  modified_base 5: mod_base = OTHER; note = 2'-fluoro modified nucleotide
  modified_base 6: mod_base = OTHER; note = 2'-O-methyl modified nucleotide
  modified_base 7: mod_base = OTHER; note = 2'-fluoro modified nucleotide
  modified_base 8: mod_base = OTHER; note = 2'-fluoro modified nucleotide
  modified_base 9: mod_base = OTHER; note = 2'-fluoro modified nucleotide
  modified_base 10: mod_base = OTHER; note = 2'-O-methyl modified nucleotide
  modified_base 11: mod_base = OTHER; note = 2'-O-methyl modified nucleotide
  modified_base 12: mod_base = OTHER; note = 2'-O-methyl modified nucleotide
  modified_base 13: mod_base = OTHER; note = 2'-O-methyl modified nucleotide
  modified_base 14: mod_base = OTHER; note = 2'-O-methyl modified nucleotide
  modified_base 15: mod_base = OTHER; note = 2'-O-methyl modified nucleotide
  modified_base 16: mod_base = OTHER; note = 2'-O-methyl modified nucleotide
  modified_base 17: mod_base = OTHER; note = 2'-O-methyl modified nucleotide
  modified_base 18: mod_base = OTHER; note = 2'-O-methyl modified nucleotide
  modified_base 19: mod_base = OTHER; note = 2'-O-methyl modified nucleotide
cagcattgtgatgaccaca

SEQ ID NO: 1041 - RNA, 19 nt, synthetic construct
  source 1..19: mol_type = other RNA
  modified_base 1: mod_base = OTHER; note = 2'-O-methyl modified nucleotide with phosphorothioate linkage
  modified_base 2: mod_base = OTHER; note = 2'-O-methyl modified nucleotide with phosphorothioate linkage
  modified_base 3: mod_base = OTHER; note = 2'-O-methyl modified nucleotide
  modified_base 4: mod_base = OTHER; note = 2'-O-methyl modified nucleotide
  modified_base 5: mod_base = OTHER; note = 2'-fluoro modified nucleotide
  modified_base 6: mod_base = OTHER; note = 2'-O-methyl modified nucleotide
  modified_base 7: mod_base = OTHER; note = 2'-fluoro modified nucleotide
  modified_base 8: mod_base = OTHER; note = 2'-fluoro modified nucleotide
  modified_base 9: mod_base = OTHER; note = 2'-fluoro modified nucleotide
  modified_base 10: mod_base = OTHER; note = 2'-O-methyl modified nucleotide
  modified_base 11: mod_base = OTHER; note = 2'-O-methyl modified nucleotide
  modified_base 12: mod_base = OTHER; note = 2'-O-methyl modified nucleotide
  modified_base 13: mod_base = OTHER; note = 2'-O-methyl modified nucleotide
  modified_base 14: mod_base = OTHER; note = 2'-O-methyl modified nucleotide
  modified_base 15: mod_base = OTHER; note = 2'-O-methyl modified nucleotide
  modified_base 16: mod_base = OTHER; note = 2'-O-methyl modified nucleotide
  modified_base 17: mod_base = OTHER; note = 2'-O-methyl modified nucleotide
  modified_base 18: mod_base = OTHER; note = 2'-O-methyl modified nucleotide
  modified_base 19: mod_base = OTHER; note = 2'-O-methyl modified nucleotide
tcattccttgcaccataga

SEQ ID NO: 1042 - RNA, 19 nt, synthetic construct
  source 1..19: mol_type = other RNA
  modified_base 1: mod_base = OTHER; note = 2'-O-methyl modified nucleotide with phosphorothioate linkage
  modified_base 2: mod_base = OTHER; note = 2'-O-methyl modified nucleotide with phosphorothioate linkage
  modified_base 3: mod_base = OTHER; note = 2'-O-methyl modified nucleotide
  modified_base 4: mod_base = OTHER; note = 2'-O-methyl modified nucleotide
  modified_base 5: mod_base = OTHER; note = 2'-fluoro modified nucleotide
  modified_base 6: mod_base = OTHER; note = 2'-O-methyl modified nucleotide
  modified_base 7: mod_base = OTHER; note = 2'-fluoro modified nucleotide
  modified_base 8: mod_base = OTHER; note = 2'-fluoro modified nucleotide
  modified_base 9: mod_base = OTHER; note = 2'-fluoro modified nucleotide
  modified_base 10: mod_base = OTHER; note = 2'-O-methyl modified nucleotide
  modified_base 11: mod_base = OTHER; note = 2'-O-methyl modified nucleotide
  modified_base 12: mod_base = OTHER; note = 2'-O-methyl modified nucleotide
  modified_base 13: mod_base = OTHER; note = 2'-O-methyl modified nucleotide
  modified_base 14: mod_base = OTHER; note = 2'-O-methyl modified nucleotide
  modified_base 15: mod_base = OTHER; note = 2'-O-methyl modified nucleotide
  modified_base 16: mod_base = OTHER; note = 2'-O-methyl modified nucleotide
  modified_base 17: mod_base = OTHER; note = 2'-O-methyl modified nucleotide
  modified_base 18: mod_base = OTHER; note = 2'-O-methyl modified nucleotide
  modified_base 19: mod_base = OTHER; note = 2'-O-methyl modified nucleotide
cattccttgcaccatagga

SEQ ID NO: 1043 - RNA, 19 nt, synthetic construct
  source 1..19: mol_type = other RNA
  modified_base 1: mod_base = OTHER; note = 2'-O-methyl modified nucleotide with phosphorothioate linkage
  modified_base 2: mod_base = OTHER; note = 2'-O-methyl modified nucleotide with phosphorothioate linkage
  modified_base 3: mod_base = OTHER; note = 2'-O-methyl modified nucleotide
  modified_base 4: mod_base = OTHER; note = 2'-O-methyl modified nucleotide
  modified_base 5: mod_base = OTHER; note = 2'-fluoro modified nucleotide
  modified_base 6: mod_base = OTHER; note = 2'-O-methyl modified nucleotide
  modified_base 7: mod_base = OTHER; note = 2'-fluoro modified nucleotide
  modified_base 8: mod_base = OTHER; note = 2'-fluoro modified nucleotide
  modified_base 9: mod_base = OTHER; note = 2'-fluoro modified nucleotide
  modified_base 10: mod_base = OTHER; note = 2'-O-methyl modified nucleotide
  modified_base 11: mod_base = OTHER; note = 2'-O-methyl modified nucleotide
  modified_base 12: mod_base = OTHER; note = 2'-O-methyl modified nucleotide
  modified_base 13: mod_base = OTHER; note = 2'-O-methyl modified nucleotide
  modified_base 14: mod_base = OTHER; note = 2'-O-methyl modified nucleotide
  modified_base 15: mod_base = OTHER; note = 2'-O-methyl modified nucleotide
  modified_base 16: mod_base = OTHER; note = 2'-O-methyl modified nucleotide
  modified_base 17: mod_base = OTHER; note = 2'-O-methyl modified nucleotide
  modified_base 18: mod_base = OTHER; note = 2'-O-methyl modified nucleotide
  modified_base 19: mod_base = OTHER; note = 2'-O-methyl modified nucleotide
attccttgcaccataggga

SEQ ID NO: 1044 - RNA, 19 nt, synthetic construct
  source 1..19: mol_type = other RNA
  modified_base 1: mod_base = OTHER; note = 2'-O-methyl modified nucleotide with phosphorothioate linkage
  modified_base 2: mod_base = OTHER; note = 2'-O-methyl modified nucleotide with phosphorothioate linkage
  modified_base 3: mod_base = OTHER; note = 2'-O-methyl modified nucleotide
  modified_base 4: mod_base = OTHER; note = 2'-O-methyl modified nucleotide
  modified_base 5: mod_base = OTHER; note = 2'-fluoro modified nucleotide
  modified_base 6: mod_base = OTHER; note = 2'-O-methyl modified nucleotide
  modified_base 7: mod_base = OTHER; note = 2'-fluoro modified nucleotide
  modified_base 8: mod_base = OTHER; note = 2'-fluoro modified nucleotide
  modified_base 9: mod_base = OTHER; note = 2'-fluoro modified nucleotide
  modified_base 10: mod_base = OTHER; note = 2'-O-methyl modified nucleotide
  modified_base 11: mod_base = OTHER; note = 2'-O-methyl modified nucleotide
  modified_base 12: mod_base = OTHER; note = 2'-O-methyl modified nucleotide
  modified_base 13: mod_base = OTHER; note = 2'-O-methyl modified nucleotide
  modified_base 14: mod_base = OTHER; note = 2'-O-methyl modified nucleotide
  modified_base 15: mod_base = OTHER; note = 2'-O-methyl modified nucleotide
  modified_base 16: mod_base = OTHER; note = 2'-O-methyl modified nucleotide
  modified_base 17: mod_base = OTHER; note = 2'-O-methyl modified nucleotide
  modified_base 18: mod_base = OTHER; note = 2'-O-methyl modified nucleotide
  modified_base 19: mod_base = OTHER; note = 2'-O-methyl modified nucleotide
ccttgcaccatagggatca

SEQ ID NO: 1045 - RNA, 19 nt, synthetic construct
  source 1..19: mol_type = other RNA
  modified_base 1: mod_base = OTHER; note = 2'-O-methyl modified nucleotide with phosphorothioate linkage
  modified_base 2: mod_base = OTHER; note = 2'-O-methyl modified nucleotide with phosphorothioate linkage
  modified_base 3: mod_base = OTHER; note = 2'-O-methyl modified nucleotide
  modified_base 4: mod_base = OTHER; note = 2'-O-methyl modified nucleotide
  modified_base 5: mod_base = OTHER; note = 2'-fluoro modified nucleotide
  modified_base 6: mod_base = OTHER; note = 2'-O-methyl modified nucleotide
  modified_base 7: mod_base = OTHER; note = 2'-fluoro modified nucleotide
  modified_base 8: mod_base = OTHER; note = 2'-fluoro modified nucleotide
  modified_base 9: mod_base = OTHER; note = 2'-fluoro modified nucleotide
  modified_base 10: mod_base = OTHER; note = 2'-O-methyl modified nucleotide
  modified_base 11: mod_base = OTHER; note = 2'-O-methyl modified nucleotide
  modified_base 12: mod_base = OTHER; note = 2'-O-methyl modified nucleotide
  modified_base 13: mod_base = OTHER; note = 2'-O-methyl modified nucleotide
  modified_base 14: mod_base = OTHER; note = 2'-O-methyl modified nucleotide
  modified_base 15: mod_base = OTHER; note = 2'-O-methyl modified nucleotide
  modified_base 16: mod_base = OTHER; note = 2'-O-methyl modified nucleotide
  modified_base 17: mod_base = OTHER; note = 2'-O-methyl modified nucleotide
  modified_base 18: mod_base = OTHER; note = 2'-O-methyl modified nucleotide
  modified_base 19: mod_base = OTHER; note = 2'-O-methyl modified nucleotide
cttgcaccatagggatcga

SEQ ID NO: 1046 - RNA, 19 nt, synthetic construct
  source 1..19: mol_type = other RNA
  modified_base 1: mod_base = OTHER; note = 2'-O-methyl modified nucleotide with phosphorothioate linkage
  modified_base 2: mod_base = OTHER; note = 2'-O-methyl modified nucleotide with phosphorothioate linkage
  modified_base 3: mod_base = OTHER; note = 2'-O-methyl modified nucleotide
  modified_base 4: mod_base = OTHER; note = 2'-O-methyl modified nucleotide
  modified_base 5: mod_base = OTHER; note = 2'-fluoro modified nucleotide
  modified_base 6: mod_base = OTHER; note = 2'-O-methyl modified nucleotide
  modified_base 7: mod_base = OTHER; note = 2'-fluoro modified nucleotide
  modified_base 8: mod_base = OTHER; note = 2'-fluoro modified nucleotide
  modified_base 9: mod_base = OTHER; note = 2'-fluoro modified nucleotide
  modified_base 10: mod_base = OTHER; note = 2'-O-methyl modified nucleotide
  modified_base 11: mod_base = OTHER; note = 2'-O-methyl modified nucleotide
  modified_base 12: mod_base = OTHER; note = 2'-O-methyl modified nucleotide
  modified_base 13: mod_base = OTHER; note = 2'-O-methyl modified nucleotide
  modified_base 14: mod_base = OTHER; note = 2'-O-methyl modified nucleotide
  modified_base 15: mod_base = OTHER; note = 2'-O-methyl modified nucleotide
  modified_base 16: mod_base = OTHER; note = 2'-O-methyl modified nucleotide
  modified_base 17: mod_base = OTHER; note = 2'-O-methyl modified nucleotide
  modified_base 18: mod_base = OTHER; note = 2'-O-methyl modified nucleotide
  modified_base 19: mod_base = OTHER; note = 2'-O-methyl modified nucleotide
gcaccatagggatcgtcca

SEQ ID NO: 1047 - RNA, 19 nt, synthetic construct
  source 1..19: mol_type = other RNA
  modified_base 1: mod_base = OTHER; note = 2'-O-methyl modified nucleotide with phosphorothioate linkage
  modified_base 2: mod_base = OTHER; note = 2'-O-methyl modified nucleotide with phosphorothioate linkage
  modified_base 3: mod_base = OTHER; note = 2'-O-methyl modified nucleotide
  modified_base 4: mod_base = OTHER; note = 2'-O-methyl modified nucleotide
  modified_base 5: mod_base = OTHER; note = 2'-fluoro modified nucleotide
  modified_base 6: mod_base = OTHER; note = 2'-O-methyl modified nucleotide
  modified_base 7: mod_base = OTHER; note = 2'-fluoro modified nucleotide
  modified_base 8: mod_base = OTHER; note = 2'-fluoro modified nucleotide
  modified_base 9: mod_base = OTHER; note = 2'-fluoro modified nucleotide
  modified_base 10: mod_base = OTHER; note = 2'-O-methyl modified nucleotide
  modified_base 11: mod_base = OTHER; note = 2'-O-methyl modified nucleotide
  modified_base 12: mod_base = OTHER; note = 2'-O-methyl modified nucleotide
  modified_base 13: mod_base = OTHER; note = 2'-O-methyl modified nucleotide
  modified_base 14: mod_base = OTHER; note = 2'-O-methyl modified nucleotide
  modified_base 15: mod_base = OTHER; note = 2'-O-methyl modified nucleotide
  modified_base 16: mod_base = OTHER; note = 2'-O-methyl modified nucleotide
  modified_base 17: mod_base = OTHER; note = 2'-O-methyl modified nucleotide
  modified_base 18: mod_base = OTHER; note = 2'-O-methyl modified nucleotide
  modified_base 19: mod_base = OTHER; note = 2'-O-methyl modified nucleotide
caccatagggatcgtccta

SEQ ID NO: 1048 - RNA, 19 nt, synthetic construct
  source 1..19: mol_type = other RNA
  modified_base 1: mod_base = OTHER; note = 2'-O-methyl modified nucleotide with phosphorothioate linkage
  modified_base 2: mod_base = OTHER; note = 2'-O-methyl modified nucleotide with phosphorothioate linkage
  modified_base 3: mod_base = OTHER; note = 2'-O-methyl modified nucleotide
  modified_base 4: mod_base = OTHER; note = 2'-O-methyl modified nucleotide
  modified_base 5: mod_base = OTHER; note = 2'-fluoro modified nucleotide
  modified_base 6: mod_base = OTHER; note = 2'-O-methyl modified nucleotide
  modified_base 7: mod_base = OTHER; note = 2'-fluoro modified nucleotide
  modified_base 8: mod_base = OTHER; note = 2'-fluoro modified nucleotide
  modified_base 9: mod_base = OTHER; note = 2'-fluoro modified nucleotide
  modified_base 10: mod_base = OTHER; note = 2'-O-methyl modified nucleotide
  modified_base 11: mod_base = OTHER; note = 2'-O-methyl modified nucleotide
  modified_base 12: mod_base = OTHER; note = 2'-O-methyl modified nucleotide
  modified_base 13: mod_base = OTHER; note = 2'-O-methyl modified nucleotide
  modified_base 14: mod_base = OTHER; note = 2'-O-methyl modified nucleotide
  modified_base 15: mod_base = OTHER; note = 2'-O-methyl modified nucleotide
  modified_base 16: mod_base = OTHER; note = 2'-O-methyl modified nucleotide
  modified_base 17: mod_base = OTHER; note = 2'-O-methyl modified nucleotide
  modified_base 18: mod_base = OTHER; note = 2'-O-methyl modified nucleotide
  modified_base 19: mod_base = OTHER; note = 2'-O-methyl modified nucleotide
accatagggatcgtcctca

SEQ ID NO: 1049 - RNA, 21 nt, synthetic construct
  source 1..21: mol_type = other RNA
  modified_base 1: mod_base = OTHER; note = Vinyl-phosphonate 2'-O-methyl modified nucleotide with phosphorothioate linkage
  modified_base 2: mod_base = OTHER; note = 2'-fluoro modified nucleotide with phosphorothioate linkage
  modified_base 3: mod_base = OTHER; note = 2'-O-methyl modified nucleotide
  modified_base 4: mod_base = OTHER; note = 2'-O-methyl modified nucleotide
  modified_base 5: mod_base = OTHER; note = 2'-O-methyl modified nucleotide
  modified_base 6: mod_base = OTHER; note = 2'-fluoro modified nucleotide
  modified_base 7: mod_base = OTHER; note = 2'-O-methyl modified nucleotide
  modified_base 8: mod_base = OTHER; note = 2'-O-methyl modified nucleotide
  modified_base 9: mod_base = OTHER; note = 2'-O-methyl modified nucleotide
  modified_base 10: mod_base = OTHER; note = 2'-O-methyl modified nucleotide
  modified_base 11: mod_base = OTHER; note = 2'-O-methyl modified nucleotide
  modified_base 12: mod_base = OTHER; note = 2'-O-methyl modified nucleotide
  modified_base 13: mod_base = OTHER; note = 2'-O-methyl modified nucleotide
  modified_base 14: mod_base = OTHER; note = 2'-fluoro modified nucleotide
  modified_base 15: mod_base = OTHER; note = 2'-O-methyl modified nucleotide
  modified_base 16: mod_base = OTHER; note = 2'-fluoro modified nucleotide
  modified_base 17: mod_base = OTHER; note = 2'-O-methyl modified nucleotide
  modified_base 18: mod_base = OTHER; note = 2'-O-methyl modified nucleotide
  modified_base 19: mod_base = OTHER; note = 2'-O-methyl modified nucleotide with phosphorothioate linkage
  modified_base 20: mod_base = OTHER; note = 2'-O-methyl modified nucleotide with phosphorothioate linkage
  modified_base 21: mod_base = OTHER; note = 2'-O-methyl modified nucleotide
ttttgtagggcaccttgtcct

SEQ ID NO: 1050 - RNA, 21 nt, synthetic construct
  source 1..21: mol_type = other RNA
  modified_base 1: mod_base = OTHER; note = Vinyl-phosphonate 2'-O-methyl modified nucleotide with phosphorothioate linkage
  modified_base 2: mod_base = OTHER; note = 2'-fluoro modified nucleotide with phosphorothioate linkage
  modified_base 3: mod_base = OTHER; note = 2'-O-methyl modified nucleotide
  modified_base 4: mod_base = OTHER; note = 2'-O-methyl modified nucleotide
  modified_base 5: mod_base = OTHER; note = 2'-O-methyl modified nucleotide
  modified_base 6: mod_base = OTHER; note = 2'-fluoro modified nucleotide
  modified_base 7: mod_base = OTHER; note = 2'-O-methyl modified nucleotide
  modified_base 8: mod_base = OTHER; note = 2'-O-methyl modified nucleotide
  modified_base 9: mod_base = OTHER; note = 2'-O-methyl modified nucleotide
  modified_base 10: mod_base = OTHER; note = 2'-O-methyl modified nucleotide
  modified_base 11: mod_base = OTHER; note = 2'-O-methyl modified nucleotide
  modified_base 12: mod_base = OTHER; note = 2'-O-methyl modified nucleotide
  modified_base 13: mod_base = OTHER; note = 2'-O-methyl modified nucleotide
  modified_base 14: mod_base = OTHER; note = 2'-fluoro modified nucleotide
  modified_base 15: mod_base = OTHER; note = 2'-O-methyl modified nucleotide
  modified_base 16: mod_base = OTHER; note = 2'-fluoro modified nucleotide
  modified_base 17: mod_base = OTHER; note = 2'-O-methyl modified nucleotide
  modified_base 18: mod_base = OTHER; note = 2'-O-methyl modified nucleotide
  modified_base 19: mod_base = OTHER; note = 2'-O-methyl modified nucleotide with phosphorothioate linkage
  modified_base 20: mod_base = OTHER; note = 2'-O-methyl modified nucleotide with phosphorothioate linkage
  modified_base 21: mod_base = OTHER; note = 2'-O-methyl modified nucleotide
tataatgcctttgtagggcac

SEQ ID NO: 1051 - RNA, 21 nt, synthetic construct
  source 1..21: mol_type = other RNA
  modified_base 1: mod_base = OTHER; note = Vinyl-phosphonate 2'-O-methyl modified nucleotide with phosphorothioate linkage
  modified_base 2: mod_base = OTHER; note = 2'-fluoro modified nucleotide with phosphorothioate linkage
  modified_base 3: mod_base = OTHER; note = 2'-O-methyl modified nucleotide
  modified_base 4: mod_base = OTHER; note = 2'-O-methyl modified nucleotide
  modified_base 5: mod_base = OTHER; note = 2'-O-methyl modified nucleotide
  modified_base 6: mod_base = OTHER; note = 2'-fluoro modified nucleotide
  modified_base 7: mod_base = OTHER; note = 2'-O-methyl modified nucleotide
  modified_base 8: mod_base = OTHER; note = 2'-O-methyl modified nucleotide
  modified_base 9: mod_base = OTHER; note = 2'-O-methyl modified nucleotide
  modified_base 10: mod_base = OTHER; note = 2'-O-methyl modified nucleotide
  modified_base 11: mod_base = OTHER; note = 2'-O-methyl modified nucleotide
  modified_base 12: mod_base = OTHER; note = 2'-O-methyl modified nucleotide
  modified_base 13: mod_base = OTHER; note = 2'-O-methyl modified nucleotide
  modified_base 14: mod_base = OTHER; note = 2'-fluoro modified nucleotide
  modified_base 15: mod_base = OTHER; note = 2'-O-methyl modified nucleotide
  modified_base 16: mod_base = OTHER; note = 2'-fluoro modified nucleotide
  modified_base 17: mod_base = OTHER; note = 2'-O-methyl modified nucleotide
  modified_base 18: mod_base = OTHER; note = 2'-O-methyl modified nucleotide
  modified_base 19: mod_base = OTHER; note = 2'-O-methyl modified nucleotide with phosphorothioate linkage
  modified_base 20: mod_base = OTHER; note = 2'-O-methyl modified nucleotide with phosphorothioate linkage
  modified_base 21: mod_base = OTHER; note = 2'-O-methyl modified nucleotide
ttagggtacatagtgtggcct

SEQ ID NO: 1052 - RNA, 21 nt, synthetic construct
  source 1..21: mol_type = other RNA
  modified_base 1: mod_base = OTHER; note = Vinyl-phosphonate 2'-O-methyl modified nucleotide with phosphorothioate linkage
  modified_base 2: mod_base = OTHER; note = 2'-fluoro modified nucleotide with phosphorothioate linkage
  modified_base 3: mod_base = OTHER; note = 2'-O-methyl modified nucleotide
  modified_base 4: mod_base = OTHER; note = 2'-O-methyl modified nucleotide
  modified_base 5: mod_base = OTHER; note = 2'-O-methyl modified nucleotide
  modified_base 6: mod_base = OTHER; note = 2'-fluoro modified nucleotide
  modified_base 7: mod_base = OTHER; note = 2'-O-methyl modified nucleotide
  modified_base 8: mod_base = OTHER; note = 2'-O-methyl modified nucleotide
  modified_base 9: mod_base = OTHER; note = 2'-O-methyl modified nucleotide
  modified_base 10: mod_base = OTHER; note = 2'-O-methyl modified nucleotide
  modified_base 11: mod_base = OTHER; note = 2'-O-methyl modified nucleotide
  modified_base 12: mod_base = OTHER; note = 2'-O-methyl modified nucleotide
  modified_base 13: mod_base = OTHER; note = 2'-O-methyl modified nucleotide
  modified_base 14: mod_base = OTHER; note = 2'-fluoro modified nucleotide
  modified_base 15: mod_base = OTHER; note = 2'-O-methyl modified nucleotide
  modified_base 16: mod_base = OTHER; note = 2'-fluoro modified nucleotide
  modified_base 17: mod_base = OTHER; note = 2'-O-methyl modified nucleotide
  modified_base 18: mod_base = OTHER; note = 2'-O-methyl modified nucleotide
  modified_base 19: mod_base = OTHER; note = 2'-O-methyl modified nucleotide with phosphorothioate linkage
  modified_base 20: mod_base = OTHER; note = 2'-O-methyl modified nucleotide with phosphorothioate linkage
  modified_base 21: mod_base = OTHER; note = 2'-O-methyl modified nucleotide
tatgacgaacatgatgctgtt

SEQ ID NO: 1053 - RNA, 21 nt, synthetic construct
  source 1..21: mol_type = other RNA
  modified_base 1: mod_base = OTHER; note = Vinyl-phosphonate 2'-O-methyl modified nucleotide with phosphorothioate linkage
  modified_base 2: mod_base = OTHER; note = 2'-fluoro modified nucleotide with phosphorothioate linkage
  modified_base 3: mod_base = OTHER; note = 2'-O-methyl modified nucleotide
  modified_base 4: mod_base = OTHER; note = 2'-O-methyl modified nucleotide
  modified_base 5: mod_base = OTHER; note = 2'-O-methyl modified nucleotide
  modified_base 6: mod_base = OTHER; note = 2'-fluoro modified nucleotide
  modified_base 7: mod_base = OTHER; note = 2'-O-methyl modified nucleotide
  modified_base 8: mod_base = OTHER; note = 2'-O-methyl modified nucleotide
  modified_base 9: mod_base = OTHER; note = 2'-O-methyl modified nucleotide
  modified_base 10: mod_base = OTHER; note = 2'-O-methyl modified nucleotide
  modified_base 11: mod_base = OTHER; note = 2'-O-methyl modified nucleotide
  modified_base 12: mod_base = OTHER; note = 2'-O-methyl modified nucleotide
  modified_base 13: mod_base = OTHER; note = 2'-O-methyl modified nucleotide
  modified_base 14: mod_base = OTHER; note = 2'-fluoro modified nucleotide
  modified_base 15: mod_base = OTHER; note = 2'-O-methyl modified nucleotide
  modified_base 16: mod_base = OTHER; note = 2'-fluoro modified nucleotide
  modified_base 17: mod_base = OTHER; note = 2'-O-methyl modified nucleotide
  modified_base 18: mod_base = OTHER; note = 2'-O-methyl modified nucleotide
  modified_base 19: mod_base = OTHER; note = 2'-O-methyl modified nucleotide with phosphorothioate linkage
  modified_base 20: mod_base = OTHER; note = 2'-O-methyl modified nucleotide with phosphorothioate linkage
  modified_base 21: mod_base = OTHER; note = 2'-O-methyl modified nucleotide
ttgtggtgtcatgacgaacat

SEQ ID NO: 1054 - RNA, 21 nt, synthetic construct
  source 1..21: mol_type = other RNA
  modified_base 1: mod_base = OTHER; note = Vinyl-phosphonate 2'-O-methyl modified nucleotide with phosphorothioate linkage
  modified_base 2: mod_base = OTHER; note = 2'-fluoro modified nucleotide with phosphorothioate linkage
  modified_base 3: mod_base = OTHER; note = 2'-O-methyl modified nucleotide
  modified_base 4: mod_base = OTHER; note = 2'-O-methyl modified nucleotide
  modified_base 5: mod_base = OTHER; note = 2'-O-methyl modified nucleotide
  modified_base 6: mod_base = OTHER; note = 2'-fluoro modified nucleotide
  modified_base 7: mod_base = OTHER; note = 2'-O-methyl modified nucleotide
  modified_base 8: mod_base = OTHER; note = 2'-O-methyl modified nucleotide
  modified_base 9: mod_base = OTHER; note = 2'-O-methyl modified nucleotide
  modified_base 10: mod_base = OTHER; note = 2'-O-methyl modified nucleotide
  modified_base 11: mod_base = OTHER; note = 2'-O-methyl modified nucleotide
  modified_base 12: mod_base = OTHER; note = 2'-O-methyl modified nucleotide
  modified_base 13: mod_base = OTHER; note = 2'-O-methyl modified nucleotide
  modified_base 14: mod_base = OTHER; note = 2'-fluoro modified nucleotide
  modified_base 15: mod_base = OTHER; note = 2'-O-methyl modified nucleotide
  modified_base 16: mod_base = OTHER; note = 2'-fluoro modified nucleotide
  modified_base 17: mod_base = OTHER; note = 2'-O-methyl modified nucleotide
  modified_base 18: mod_base = OTHER; note = 2'-O-methyl modified nucleotide
  modified_base 19: mod_base = OTHER; note = 2'-O-methyl modified nucleotide with phosphorothioate linkage
  modified_base 20: mod_base = OTHER; note = 2'-O-methyl modified nucleotide with phosphorothioate linkage
  modified_base 21: mod_base = OTHER; note = 2'-O-methyl modified nucleotide
taagtgtggtgtcatgacgaa

SEQ ID NO: 1055 - RNA, 21 nt, synthetic construct
  source 1..21: mol_type = other RNA
  modified_base 1: mod_base = OTHER; note = Vinyl-phosphonate 2'-O-methyl modified nucleotide with phosphorothioate linkage
  modified_base 2: mod_base = OTHER; note = 2'-fluoro modified nucleotide with phosphorothioate linkage
  modified_base 3: mod_base = OTHER; note = 2'-O-methyl modified nucleotide
  modified_base 4: mod_base = OTHER; note = 2'-O-methyl modified nucleotide
  modified_base 5: mod_base = OTHER; note = 2'-O-methyl modified nucleotide
  modified_base 6: mod_base = OTHER; note = 2'-fluoro modified nucleotide
  modified_base 7: mod_base = OTHER; note = 2'-O-methyl modified nucleotide
  modified_base 8: mod_base = OTHER; note = 2'-O-methyl modified nucleotide
  modified_base 9: mod_base = OTHER; note = 2'-O-methyl modified nucleotide
  modified_base 10: mod_base = OTHER; note = 2'-O-methyl modified nucleotide
  modified_base 11: mod_base = OTHER; note = 2'-O-methyl modified nucleotide
  modified_base 12: mod_base = OTHER; note = 2'-O-methyl modified nucleotide
  modified_base 13: mod_base = OTHER; note = 2'-O-methyl modified nucleotide
  modified_base 14: mod_base = OTHER; note = 2'-fluoro modified nucleotide
  modified_base 15: mod_base = OTHER; note = 2'-O-methyl modified nucleotide
  modified_base 16: mod_base = OTHER; note = 2'-fluoro modified nucleotide
  modified_base 17: mod_base = OTHER; note = 2'-O-methyl modified nucleotide
  modified_base 18: mod_base = OTHER; note = 2'-O-methyl modified nucleotide
  modified_base 19: mod_base = OTHER; note = 2'-O-methyl modified nucleotide with phosphorothioate linkage
  modified_base 20: mod_base = OTHER; note = 2'-O-methyl modified nucleotide with phosphorothioate linkage
  modified_base 21: mod_base = OTHER; note = 2'-O-methyl modified nucleotide
tatgctgatggtgcgtctgca

SEQ ID NO: 1056 - RNA, 21 nt, synthetic construct
  source 1..21: mol_type = other RNA
  modified_base 1: mod_base = OTHER; note = Vinyl-phosphonate 2'-O-methyl modified nucleotide with phosphorothioate linkage
  modified_base 2: mod_base = OTHER; note = 2'-fluoro modified nucleotide with phosphorothioate linkage
  modified_base 3: mod_base = OTHER; note = 2'-O-methyl modified nucleotide
  modified_base 4: mod_base = OTHER; note = 2'-O-methyl modified nucleotide
  modified_base 5: mod_base = OTHER; note = 2'-O-methyl modified nucleotide
  modified_base 6: mod_base = OTHER; note = 2'-fluoro modified nucleotide
  modified_base 7: mod_base = OTHER; note = 2'-O-methyl modified nucleotide
  modified_base 8: mod_base = OTHER; note = 2'-O-methyl modified nucleotide
  modified_base 9: mod_base = OTHER; note = 2'-O-methyl modified nucleotide
  modified_base 10: mod_base = OTHER; note = 2'-O-methyl modified nucleotide
  modified_base 11: mod_base = OTHER; note = 2'-O-methyl modified nucleotide
  modified_base 12: mod_base = OTHER; note = 2'-O-methyl modified nucleotide
  modified_base 13: mod_base = OTHER; note = 2'-O-methyl modified nucleotide
  modified_base 14: mod_base = OTHER; note = 2'-fluoro modified nucleotide
  modified_base 15: mod_base = OTHER; note = 2'-O-methyl modified nucleotide
  modified_base 16: mod_base = OTHER; note = 2'-fluoro modified nucleotide
  modified_base 17: mod_base = OTHER; note = 2'-O-methyl modified nucleotide
  modified_base 18: mod_base = OTHER; note = 2'-O-methyl modified nucleotide
  modified_base 19: mod_base = OTHER; note = 2'-O-methyl modified nucleotide with phosphorothioate linkage
  modified_base 20: mod_base = OTHER; note = 2'-O-methyl modified nucleotide with phosphorothioate linkage
  modified_base 21: mod_base = OTHER; note = 2'-O-methyl modified nucleotide
tttgaggatggtagaacagag

SEQ ID NO: 1057 - RNA, 21 nt, synthetic construct
  source 1..21: mol_type = other RNA
  modified_base 1: mod_base = OTHER; note = Vinyl-phosphonate 2'-O-methyl modified nucleotide with phosphorothioate linkage
  modified_base 2: mod_base = OTHER; note = 2'-fluoro modified nucleotide with phosphorothioate linkage
  modified_base 3: mod_base = OTHER; note = 2'-O-methyl modified nucleotide
  modified_base 4: mod_base = OTHER; note = 2'-O-methyl modified nucleotide
  modified_base 5: mod_base = OTHER; note = 2'-O-methyl modified nucleotide
  modified_base 6: mod_base = OTHER; note = 2'-fluoro modified nucleotide
  modified_base 7: mod_base = OTHER; note = 2'-O-methyl modified nucleotide
  modified_base 8: mod_base = OTHER; note = 2'-O-methyl modified nucleotide
  modified_base 9: mod_base = OTHER; note = 2'-O-methyl modified nucleotide
  modified_base 10: mod_base = OTHER; note = 2'-O-methyl modified nucleotide
  modified_base 11: mod_base = OTHER; note = 2'-O-methyl modified nucleotide
  modified_base 12: mod_base = OTHER; note = 2'-O-methyl modified nucleotide
  modified_base 13: mod_base = OTHER; note = 2'-O-methyl modified nucleotide
  modified_base 14: mod_base = OTHER; note = 2'-fluoro modified nucleotide
  modified_base 15: mod_base = OTHER; note = 2'-O-methyl modified nucleotide
  modified_base 16: mod_base = OTHER; note = 2'-fluoro modified nucleotide
  modified_base 17: mod_base = OTHER; note = 2'-O-methyl modified nucleotide
  modified_base 18: mod_base = OTHER; note = 2'-O-methyl modified nucleotide
  modified_base 19: mod_base = OTHER; note = 2'-O-methyl modified nucleotide with phosphorothioate linkage
  modified_base 20: mod_base = OTHER; note = 2'-O-methyl modified nucleotide with phosphorothioate linkage
  modified_base 21: mod_base = OTHER; note = 2'-O-methyl modified nucleotide
ttaactaccagaatgacgctg

SEQ ID NO: 1058 - RNA, 21 nt, synthetic construct
  source 1..21: mol_type = other RNA
  modified_base 1: mod_base = OTHER; note = Vinyl-phosphonate 2'-O-methyl modified nucleotide with phosphorothioate linkage
  modified_base 2: mod_base = OTHER; note = 2'-fluoro modified nucleotide with phosphorothioate linkage
  modified_base 3: mod_base = OTHER; note = 2'-O-methyl modified nucleotide
  modified_base 4: mod_base = OTHER; note = 2'-O-methyl modified nucleotide
  modified_base 5: mod_base = OTHER; note = 2'-O-methyl modified nucleotide
  modified_base 6: mod_base = OTHER; note = 2'-fluoro modified nucleotide
  modified_base 7: mod_base = OTHER; note = 2'-O-methyl modified nucleotide
  modified_base 8: mod_base = OTHER; note = 2'-O-methyl modified nucleotide
  modified_base 9: mod_base = OTHER; note = 2'-O-methyl modified nucleotide
  modified_base 10: mod_base = OTHER; note = 2'-O-methyl modified nucleotide
  modified_base 11: mod_base = OTHER; note = 2'-O-methyl modified nucleotide
  modified_base 12: mod_base = OTHER; note = 2'-O-methyl modified nucleotide
  modified_base 13: mod_base = OTHER; note = 2'-O-methyl modified nucleotide
  modified_base 14: mod_base = OTHER; note = 2'-fluoro modified nucleotide
  modified_base 15: mod_base = OTHER; note = 2'-O-methyl modified nucleotide
  modified_base 16: mod_base = OTHER; note = 2'-fluoro modified nucleotide
  modified_base 17: mod_base = OTHER; note = 2'-O-methyl modified nucleotide
  modified_base 18: mod_base = OTHER; note = 2'-O-methyl modified nucleotide
  modified_base 19: mod_base = OTHER; note = 2'-O-methyl modified nucleotide with phosphorothioate linkage
  modified_base 20: mod_base = OTHER; note = 2'-O-methyl modified nucleotide with phosphorothioate linkage
  modified_base 21: mod_base = OTHER; note = 2'-O-methyl modified nucleotide
tataactaccagaatgacgct

SEQ ID NO: 1059 - RNA, 21 nt, synthetic construct
  source 1..21: mol_type = other RNA
  modified_base 1: mod_base = OTHER; note = Vinyl-phosphonate 2'-O-methyl modified nucleotide with phosphorothioate linkage
  modified_base 2: mod_base = OTHER; note = 2'-fluoro modified nucleotide with phosphorothioate linkage
  modified_base 3: mod_base = OTHER; note = 2'-O-methyl modified nucleotide
  modified_base 4: mod_base = OTHER; note = 2'-O-methyl modified nucleotide
  modified_base 5: mod_base = OTHER; note = 2'-O-methyl modified nucleotide
  modified_base 6: mod_base = OTHER; note = 2'-fluoro modified nucleotide
  modified_base 7: mod_base = OTHER; note = 2'-O-methyl modified nucleotide
  modified_base 8: mod_base = OTHER; note = 2'-O-methyl modified nucleotide
  modified_base 9: mod_base = OTHER; note = 2'-O-methyl modified nucleotide
  modified_base 10: mod_base = OTHER; note = 2'-O-methyl modified nucleotide
  modified_base 11: mod_base = OTHER; note = 2'-O-methyl modified nucleotide
  modified_base 12: mod_base = OTHER; note = 2'-O-methyl modified nucleotide
  modified_base 13: mod_base = OTHER; note = 2'-O-methyl modified nucleotide
  modified_base 14: mod_base = OTHER; note = 2'-fluoro modified nucleotide
  modified_base 15: mod_base = OTHER; note = 2'-O-methyl modified nucleotide
  modified_base 16: mod_base = OTHER; note = 2'-fluoro modified nucleotide
  modified_base 17: mod_base = OTHER; note = 2'-O-methyl modified nucleotide
  modified_base 18: mod_base = OTHER; note = 2'-O-methyl modified nucleotide
  modified_base 19: mod_base = OTHER; note = 2'-O-methyl modified nucleotide with phosphorothioate linkage
  modified_base 20: mod_base = OTHER; note = 2'-O-methyl modified nucleotide with phosphorothioate linkage
  modified_base 21: mod_base = OTHER; note = 2'-O-methyl modified nucleotide
taacataactaccagaatgac

SEQ ID NO: 1060 - RNA, 21 nt, synthetic construct
  source 1..21: mol_type = other RNA
  modified_base 1: mod_base = OTHER; note = Vinyl-phosphonate 2'-O-methyl modified nucleotide with phosphorothioate linkage
  modified_base 2: mod_base = OTHER; note = 2'-fluoro modified nucleotide with phosphorothioate linkage
  modified_base 3: mod_base = OTHER; note = 2'-O-methyl modified nucleotide
  modified_base 4: mod_base = OTHER; note = 2'-O-methyl modified nucleotide
  modified_base 5: mod_base = OTHER; note = 2'-O-methyl modified nucleotide
  modified_base 6: mod_base = OTHER; note = 2'-fluoro modified nucleotide
  modified_base 7: mod_base = OTHER; note = 2'-O-methyl modified nucleotide
  modified_base 8: mod_base = OTHER; note = 2'-O-methyl modified nucleotide
  modified_base 9: mod_base = OTHER; note = 2'-O-methyl modified nucleotide
  modified_base 10: mod_base = OTHER; note = 2'-O-methyl modified nucleotide
  modified_base 11: mod_base = OTHER; note = 2'-O-methyl modified nucleotide
  modified_base 12: mod_base = OTHER; note = 2'-O-methyl modified nucleotide
  modified_base 13: mod_base = OTHER; note = 2'-O-methyl modified nucleotide
  modified_base 14: mod_base = OTHER; note = 2'-fluoro modified nucleotide
  modified_base 15: mod_base = OTHER; note = 2'-O-methyl modified nucleotide
  modified_base 16: mod_base = OTHER; note = 2'-fluoro modified nucleotide
  modified_base 17: mod_base = OTHER; note = 2'-O-methyl modified nucleotide
  modified_base 18: mod_base = OTHER; note = 2'-O-methyl modified nucleotide
  modified_base 19: mod_base = OTHER; note = 2'-O-methyl modified nucleotide with phosphorothioate linkage
  modified_base 20: mod_base = OTHER; note = 2'-O-methyl modified nucleotide with phosphorothioate linkage
  modified_base 21: mod_base = OTHER; note = 2'-O-methyl modified nucleotide
tactatggcgatgatcacccc

SEQ ID NO: 1061 - RNA, 21 nt, synthetic construct
  source 1..21: mol_type = other RNA
  modified_base 1: mod_base = OTHER; note = Vinyl-phosphonate 2'-O-methyl modified nucleotide with phosphorothioate linkage
  modified_base 2: mod_base = OTHER; note = 2'-fluoro modified nucleotide with phosphorothioate linkage
  modified_base 3: mod_base = OTHER; note = 2'-O-methyl modified nucleotide
  modified_base 4: mod_base = OTHER; note = 2'-O-methyl modified nucleotide
  modified_base 5: mod_base = OTHER; note = 2'-O-methyl modified nucleotide
  modified_base 6: mod_base = OTHER; note = 2'-fluoro modified nucleotide
  modified_base 7: mod_base = OTHER; note = 2'-O-methyl modified nucleotide
  modified_base 8: mod_base = OTHER; note = 2'-O-methyl modified nucleotide
  modified_base 9: mod_base = OTHER; note = 2'-O-methyl modified nucleotide
  modified_base 10: mod_base = OTHER; note = 2'-O-methyl modified nucleotide
  modified_base 11: mod_base = OTHER; note = 2'-O-methyl modified nucleotide
  modified_base 12: mod_base = OTHER; note = 2'-O-methyl modified nucleotide
  modified_base 13: mod_base = OTHER; note = 2'-O-methyl modified nucleotide
  modified_base 14: mod_base = OTHER; note = 2'-fluoro modified nucleotide
  modified_base 15: mod_base = OTHER; note = 2'-O-methyl modified nucleotide
  modified_base 16: mod_base = OTHER; note = 2'-fluoro modified nucleotide
  modified_base 17: mod_base = OTHER; note = 2'-O-methyl modified nucleotide
  modified_base 18: mod_base = OTHER; note = 2'-O-methyl modified nucleotide
  modified_base 19: mod_base = OTHER; note = 2'-O-methyl modified nucleotide with phosphorothioate linkage
  modified_base 20: mod_base = OTHER; note = 2'-O-methyl modified nucleotide with phosphorothioate linkage
  modified_base 21: mod_base = OTHER; note = 2'-O-methyl modified nucleotide
tatgataccgtactgggccac

SEQ ID NO: 1062 - RNA, 21 nt, synthetic construct
  source 1..21: mol_type = other RNA
  modified_base 1: mod_base = OTHER; note = Vinyl-phosphonate 2'-O-methyl modified nucleotide with phosphorothioate linkage
  modified_base 2: mod_base = OTHER; note = 2'-fluoro modified nucleotide with phosphorothioate linkage
  modified_base 3: mod_base = OTHER; note = 2'-O-methyl modified nucleotide
  modified_base 4: mod_base = OTHER; note = 2'-O-methyl modified nucleotide
  modified_base 5: mod_base = OTHER; note = 2'-O-methyl modified nucleotide
  modified_base 6: mod_base = OTHER; note = 2'-fluoro modified nucleotide
  modified_base 7: mod_base = OTHER; note = 2'-O-methyl modified nucleotide
  modified_base 8: mod_base = OTHER; note = 2'-O-methyl modified nucleotide
  modified_base 9: mod_base = OTHER; note = 2'-O-methyl modified nucleotide
  modified_base 10: mod_base = OTHER; note = 2'-O-methyl modified nucleotide
  modified_base 11: mod_base = OTHER; note = 2'-O-methyl modified nucleotide
  modified_base 12: mod_base = OTHER; note = 2'-O-methyl modified nucleotide
  modified_base 13: mod_base = OTHER; note = 2'-O-methyl modified nucleotide
  modified_base 14: mod_base = OTHER; note = 2'-fluoro modified nucleotide
  modified_base 15: mod_base = OTHER; note = 2'-O-methyl modified nucleotide
  modified_base 16: mod_base = OTHER; note = 2'-fluoro modified nucleotide
  modified_base 17: mod_base = OTHER; note = 2'-O-methyl modified nucleotide
  modified_base 18: mod_base = OTHER; note = 2'-O-methyl modified nucleotide
  modified_base 19: mod_base = OTHER; note = 2'-O-methyl modified nucleotide with phosphorothioate linkage
  modified_base 20: mod_base = OTHER; note = 2'-O-methyl modified nucleotide with phosphorothioate linkage
  modified_base 21: mod_base = OTHER; note = 2'-O-methyl modified nucleotide
tattcctttgctgtagatgta

SEQ ID NO: 1063 - RNA, 21 nt, synthetic construct
  source 1..21: mol_type = other RNA
  modified_base 1: mod_base = OTHER; note = Vinyl-phosphonate 2'-O-methyl modified nucleotide with phosphorothioate linkage
  modified_base 2: mod_base = OTHER; note = 2'-fluoro modified nucleotide with phosphorothioate linkage
  modified_base 3: mod_base = OTHER; note = 2'-O-methyl modified nucleotide
  modified_base 4: mod_base = OTHER; note = 2'-O-methyl modified nucleotide
  modified_base 5: mod_base = OTHER; note = 2'-O-methyl modified nucleotide
  modified_base 6: mod_base = OTHER; note = 2'-fluoro modified nucleotide
  modified_base 7: mod_base = OTHER; note = 2'-O-methyl modified nucleotide
  modified_base 8: mod_base = OTHER; note = 2'-O-methyl modified nucleotide
  modified_base 9: mod_base = OTHER; note = 2'-O-methyl modified nucleotide
  modified_base 10: mod_base = OTHER; note = 2'-O-methyl modified nucleotide
  modified_base 11: mod_base = OTHER; note = 2'-O-methyl modified nucleotide
  modified_base 12: mod_base = OTHER; note = 2'-O-methyl modified nucleotide
  modified_base 13: mod_base = OTHER; note = 2'-O-methyl modified nucleotide
  modified_base 14: mod_base = OTHER; note = 2'-fluoro modified nucleotide
  modified_base 15: mod_base = OTHER; note = 2'-O-methyl modified nucleotide
  modified_base 16: mod_base = OTHER; note = 2'-fluoro modified nucleotide
  modified_base 17: mod_base = OTHER; note = 2'-O-methyl modified nucleotide
  modified_base 18: mod_base = OTHER; note = 2'-O-methyl modified nucleotide
  modified_base 19: mod_base = OTHER; note = 2'-O-methyl modified nucleotide with phosphorothioate linkage
  modified_base 20: mod_base = OTHER; note = 2'-O-methyl modified nucleotide with phosphorothioate linkage
  modified_base 21: mod_base = OTHER; note = 2'-O-methyl modified nucleotide
tttaagatctccgtcgtagat

SEQ ID NO: 1064 - RNA, 21 nt, synthetic construct
  source 1..21: mol_type = other RNA
  modified_base 1: mod_base = OTHER; note = Vinyl-phosphonate 2'-O-methyl modified nucleotide with phosphorothioate linkage
  modified_base 2: mod_base = OTHER; note = 2'-fluoro modified nucleotide with phosphorothioate linkage
  modified_base 3: mod_base = OTHER; note = 2'-O-methyl modified nucleotide
  modified_base 4: mod_base = OTHER; note = 2'-O-methyl modified nucleotide
  modified_base 5: mod_base = OTHER; note = 2'-O-methyl modified nucleotide
  modified_base 6: mod_base = OTHER; note = 2'-fluoro modified nucleotide
  modified_base 7: mod_base = OTHER; note = 2'-O-methyl modified nucleotide
  modified_base 8: mod_base = OTHER; note = 2'-O-methyl modified nucleotide
  modified_base 9: mod_base = OTHER; note = 2'-O-methyl modified nucleotide
  modified_base 10: mod_base = OTHER; note = 2'-O-methyl modified nucleotide
  modified_base 11: mod_base = OTHER; note = 2'-O-methyl modified nucleotide
  modified_base 12: mod_base = OTHER; note = 2'-O-methyl modified nucleotide
  modified_base 13: mod_base = OTHER; note = 2'-O-methyl modified nucleotide
  modified_base 14: mod_base = OTHER; note = 2'-fluoro modified nucleotide
  modified_base 15: mod_base = OTHER; note = 2'-O-methyl modified nucleotide
  modified_base 16: mod_base = OTHER; note = 2'-fluoro modified nucleotide
  modified_base 17: mod_base = OTHER; note = 2'-O-methyl modified nucleotide
  modified_base 18: mod_base = OTHER; note = 2'-O-methyl modified nucleotide
  modified_base 19: mod_base = OTHER; note = 2'-O-methyl modified nucleotide with phosphorothioate linkage
  modified_base 20: mod_base = OTHER; note = 2'-O-methyl modified nucleotide with phosphorothioate linkage
  modified_base 21: mod_base = OTHER; note = 2'-O-methyl modified nucleotide
tacataatgcctttgtagggc

SEQ ID NO: 1065 - RNA, 21 nt, synthetic construct
  source 1..21: mol_type = other RNA
  modified_base 1: mod_base = OTHER; note = Vinyl-phosphonate 2'-O-methyl modified nucleotide with phosphorothioate linkage
  modified_base 2: mod_base = OTHER; note = 2'-fluoro modified nucleotide with phosphorothioate linkage
  modified_base 3: mod_base = OTHER; note = 2'-O-methyl modified nucleotide
  modified_base 4: mod_base = OTHER; note = 2'-O-methyl modified nucleotide
  modified_base 5: mod_base = OTHER; note = 2'-O-methyl modified nucleotide
  modified_base 6: mod_base = OTHER; note = 2'-fluoro modified nucleotide
  modified_base 7: mod_base = OTHER; note = 2'-O-methyl modified nucleotide
  modified_base 8: mod_base = OTHER; note = 2'-O-methyl modified nucleotide
  modified_base 9: mod_base = OTHER; note = 2'-O-methyl modified nucleotide
  modified_base 10: mod_base = OTHER; note = 2'-O-methyl modified nucleotide
  modified_base 11: mod_base = OTHER; note = 2'-O-methyl modified nucleotide
  modified_base 12: mod_base = OTHER; note = 2'-O-methyl modified nucleotide
  modified_base 13: mod_base = OTHER; note = 2'-O-methyl modified nucleotide
  modified_base 14: mod_base = OTHER; note = 2'-fluoro modified nucleotide
  modified_base 15: mod_base = OTHER; note = 2'-O-methyl modified nucleotide
  modified_base 16: mod_base = OTHER; note = 2'-fluoro modified nucleotide
  modified_base 17: mod_base = OTHER; note = 2'-O-methyl modified nucleotide
  modified_base 18: mod_base = OTHER; note = 2'-O-methyl modified nucleotide
  modified_base 19: mod_base = OTHER; note = 2'-O-methyl modified nucleotide with phosphorothioate linkage
  modified_base 20: mod_base = OTHER; note = 2'-O-methyl modified nucleotide with phosphorothioate linkage
  modified_base 21: mod_base = OTHER; note = 2'-O-methyl modified nucleotide
taacataatgcctttgtaggg

SEQ ID NO: 1066 - RNA, 21 nt, synthetic construct
  source 1..21: mol_type = other RNA
  modified_base 1: mod_base = OTHER; note = Vinyl-phosphonate 2'-O-methyl modified nucleotide with phosphorothioate linkage
  modified_base 2: mod_base = OTHER; note = 2'-fluoro modified nucleotide with phosphorothioate linkage
  modified_base 3: mod_base = OTHER; note = 2'-O-methyl modified nucleotide
  modified_base 4: mod_base = OTHER; note = 2'-O-methyl modified nucleotide
  modified_base 5: mod_base = OTHER; note = 2'-O-methyl modified nucleotide
  modified_base 6: mod_base = OTHER; note = 2'-fluoro modified nucleotide
  modified_base 7: mod_base = OTHER; note = 2'-O-methyl modified nucleotide
  modified_base 8: mod_base = OTHER; note = 2'-O-methyl modified nucleotide
  modified_base 9: mod_base = OTHER; note = 2'-O-methyl modified nucleotide
  modified_base 10: mod_base = OTHER; note = 2'-O-methyl modified nucleotide
  modified_base 11: mod_base = OTHER; note = 2'-O-methyl modified nucleotide
  modified_base 12: mod_base = OTHER; note = 2'-O-methyl modified nucleotide
  modified_base 13: mod_base = OTHER; note = 2'-O-methyl modified nucleotide
  modified_base 14: mod_base = OTHER; note = 2'-fluoro modified nucleotide
  modified_base 15: mod_base = OTHER; note = 2'-O-methyl modified nucleotide
  modified_base 16: mod_base = OTHER; note = 2'-fluoro modified nucleotide
  modified_base 17: mod_base = OTHER; note = 2'-O-methyl modified nucleotide
  modified_base 18: mod_base = OTHER; note = 2'-O-methyl modified nucleotide
  modified_base 19: mod_base = OTHER; note = 2'-O-methyl modified nucleotide with phosphorothioate linkage
  modified_base 20: mod_base = OTHER; note = 2'-O-methyl modified nucleotide with phosphorothioate linkage
  modified_base 21: mod_base = OTHER; note = 2'-O-methyl modified nucleotide
ttgagaaccatgacgagtgat

SEQ ID NO: 1067 - RNA, 21 nt, synthetic construct
  source 1..21: mol_type = other RNA
  modified_base 1: mod_base = OTHER; note = Vinyl-phosphonate 2'-O-methyl modified nucleotide with phosphorothioate linkage
  modified_base 2: mod_base = OTHER; note = 2'-fluoro modified nucleotide with phosphorothioate linkage
  modified_base 3: mod_base = OTHER; note = 2'-O-methyl modified nucleotide
  modified_base 4: mod_base = OTHER; note = 2'-O-methyl modified nucleotide
  modified_base 5: mod_base = OTHER; note = 2'-O-methyl modified nucleotide
  modified_base 6: mod_base = OTHER; note = 2'-fluoro modified nucleotide
  modified_base 7: mod_base = OTHER; note = 2'-O-methyl modified nucleotide
  modified_base 8: mod_base = OTHER; note = 2'-O-methyl modified nucleotide
  modified_base 9: mod_base = OTHER; note = 2'-O-methyl modified nucleotide
  modified_base 10: mod_base = OTHER; note = 2'-O-methyl modified nucleotide
  modified_base 11: mod_base = OTHER; note = 2'-O-methyl modified nucleotide
  modified_base 12: mod_base = OTHER; note = 2'-O-methyl modified nucleotide
  modified_base 13: mod_base = OTHER; note = 2'-O-methyl modified nucleotide
  modified_base 14: mod_base = OTHER; note = 2'-fluoro modified nucleotide
  modified_base 15: mod_base = OTHER; note = 2'-O-methyl modified nucleotide
  modified_base 16: mod_base = OTHER; note = 2'-fluoro modified nucleotide
  modified_base 17: mod_base = OTHER; note = 2'-O-methyl modified nucleotide
  modified_base 18: mod_base = OTHER; note = 2'-O-methyl modified nucleotide
  modified_base 19: mod_base = OTHER; note = 2'-O-methyl modified nucleotide with phosphorothioate linkage
  modified_base 20: mod_base = OTHER; note = 2'-O-methyl modified nucleotide with phosphorothioate linkage
  modified_base 21: mod_base = OTHER; note = 2'-O-methyl modified nucleotide
taagtgatgatcatgcctgcc

SEQ ID NO: 1068 - RNA, 21 nt, synthetic construct
  source 1..21: mol_type = other RNA
  modified_base 1: mod_base = OTHER; note = Vinyl-phosphonate 2'-O-methyl modified nucleotide with phosphorothioate linkage
  modified_base 2: mod_base = OTHER; note = 2'-fluoro modified nucleotide with phosphorothioate linkage
  modified_base 3: mod_base = OTHER; note = 2'-O-methyl modified nucleotide
  modified_base 4: mod_base = OTHER; note = 2'-O-methyl modified nucleotide
  modified_base 5: mod_base = OTHER; note = 2'-O-methyl modified nucleotide
  modified_base 6: mod_base = OTHER; note = 2'-fluoro modified nucleotide
  modified_base 7: mod_base = OTHER; note = 2'-O-methyl modified nucleotide
  modified_base 8: mod_base = OTHER; note = 2'-O-methyl modified nucleotide
  modified_base 9: mod_base = OTHER; note = 2'-O-methyl modified nucleotide
  modified_base 10: mod_base = OTHER; note = 2'-O-methyl modified nucleotide
  modified_base 11: mod_base = OTHER; note = 2'-O-methyl modified nucleotide
  modified_base 12: mod_base = OTHER; note = 2'-O-methyl modified nucleotide
  modified_base 13: mod_base = OTHER; note = 2'-O-methyl modified nucleotide
  modified_base 14: mod_base = OTHER; note = 2'-fluoro modified nucleotide
  modified_base 15: mod_base = OTHER; note = 2'-O-methyl modified nucleotide
  modified_base 16: mod_base = OTHER; note = 2'-fluoro modified nucleotide
  modified_base 17: mod_base = OTHER; note = 2'-O-methyl modified nucleotide
  modified_base 18: mod_base = OTHER; note = 2'-O-methyl modified nucleotide
  modified_base 19: mod_base = OTHER; note = 2'-O-methyl modified nucleotide with phosphorothioate linkage
  modified_base 20: mod_base = OTHER; note = 2'-O-methyl modified nucleotide with phosphorothioate linkage
  modified_base 21: mod_base = OTHER; note = 2'-O-methyl modified nucleotide
tgaaagtgatgatcatgcctg

SEQ ID NO: 1069 - RNA, 21 nt, synthetic construct
  source 1..21: mol_type = other RNA
  modified_base 1: mod_base = OTHER; note = Vinyl-phosphonate 2'-O-methyl modified nucleotide with phosphorothioate linkage
  modified_base 2: mod_base = OTHER; note = 2'-fluoro modified nucleotide with phosphorothioate linkage
  modified_base 3: mod_base = OTHER; note = 2'-O-methyl modified nucleotide
  modified_base 4: mod_base = OTHER; note = 2'-O-methyl modified nucleotide
  modified_base 5: mod_base = OTHER; note = 2'-O-methyl modified nucleotide
  modified_base 6: mod_base = OTHER; note = 2'-fluoro modified nucleotide
  modified_base 7: mod_base = OTHER; note = 2'-O-methyl modified nucleotide
  modified_base 8: mod_base = OTHER; note = 2'-O-methyl modified nucleotide
  modified_base 9: mod_base = OTHER; note = 2'-O-methyl modified nucleotide
  modified_base 10: mod_base = OTHER; note = 2'-O-methyl modified nucleotide
  modified_base 11: mod_base = OTHER; note = 2'-O-methyl modified nucleotide
  modified_base 12: mod_base = OTHER; note = 2'-O-methyl modified nucleotide
  modified_base 13: mod_base = OTHER; note = 2'-O-methyl modified nucleotide
  modified_base 14: mod_base = OTHER; note = 2'-fluoro modified nucleotide
  modified_base 15: mod_base = OTHER; note = 2'-O-methyl modified nucleotide
  modified_base 16: mod_base = OTHER; note = 2'-fluoro modified nucleotide
  modified_base 17: mod_base = OTHER; note = 2'-O-methyl modified nucleotide
  modified_base 18: mod_base = OTHER; note = 2'-O-methyl modified nucleotide
  modified_base 19: mod_base = OTHER; note = 2'-O-methyl modified nucleotide with phosphorothioate linkage
  modified_base 20: mod_base = OTHER; note = 2'-O-methyl modified nucleotide with phosphorothioate linkage
  modified_base 21: mod_base = OTHER; note = 2'-O-methyl modified nucleotide
tatttagtcggaagagagcag

SEQ ID NO: 1070 - RNA, 21 nt, synthetic construct
  source 1..21: mol_type = other RNA
  modified_base 1: mod_base = OTHER; note = Vinyl-phosphonate 2'-O-methyl modified nucleotide with phosphorothioate linkage
  modified_base 2: mod_base = OTHER; note = 2'-fluoro modified nucleotide with phosphorothioate linkage
  modified_base 3: mod_base = OTHER; note = 2'-O-methyl modified nucleotide
  modified_base 4: mod_base = OTHER; note = 2'-O-methyl modified nucleotide
  modified_base 5: mod_base = OTHER; note = 2'-O-methyl modified nucleotide
  modified_base 6: mod_base = OTHER; note = 2'-fluoro modified nucleotide
  modified_base 7: mod_base = OTHER; note = 2'-O-methyl modified nucleotide
  modified_base 8: mod_base = OTHER; note = 2'-O-methyl modified nucleotide
  modified_base 9: mod_base = OTHER; note = 2'-O-methyl modified nucleotide
  modified_base 10: mod_base = OTHER; note = 2'-O-methyl modified nucleotide
  modified_base 11: mod_base = OTHER; note = 2'-O-methyl modified nucleotide
  modified_base 12: mod_base = OTHER; note = 2'-O-methyl modified nucleotide
  modified_base 13: mod_base = OTHER; note = 2'-O-methyl modified nucleotide
  modified_base 14: mod_base = OTHER; note = 2'-fluoro modified nucleotide
  modified_base 15: mod_base = OTHER; note = 2'-O-methyl modified nucleotide
  modified_base 16: mod_base = OTHER; note = 2'-fluoro modified nucleotide
  modified_base 17: mod_base = OTHER; note = 2'-O-methyl modified nucleotide
  modified_base 18: mod_base = OTHER; note = 2'-O-methyl modified nucleotide
  modified_base 19: mod_base = OTHER; note = 2'-O-methyl modified nucleotide with phosphorothioate linkage
  modified_base 20: mod_base = OTHER; note = 2'-O-methyl modified nucleotide with phosphorothioate linkage
  modified_base 21: mod_base = OTHER; note = 2'-O-methyl modified nucleotide
tgtagaacagagttggacgtt

SEQ ID NO: 1071 - RNA, 21 nt, synthetic construct
  source 1..21: mol_type = other RNA
  modified_base 1: mod_base = OTHER; note = Vinyl-phosphonate 2'-O-methyl modified nucleotide with phosphorothioate linkage
  modified_base 2: mod_base = OTHER; note = 2'-fluoro modified nucleotide with phosphorothioate linkage
  modified_base 3: mod_base = OTHER; note = 2'-O-methyl modified nucleotide
  modified_base 4: mod_base = OTHER; note = 2'-O-methyl modified nucleotide
  modified_base 5: mod_base = OTHER; note = 2'-O-methyl modified nucleotide
  modified_base 6: mod_base = OTHER; note = 2'-fluoro modified nucleotide
  modified_base 7: mod_base = OTHER; note = 2'-O-methyl modified nucleotide
  modified_base 8: mod_base = OTHER; note = 2'-O-methyl modified nucleotide
  modified_base 9: mod_base = OTHER; note = 2'-O-methyl modified nucleotide
  modified_base 10: mod_base = OTHER; note = 2'-O-methyl modified nucleotide
  modified_base 11: mod_base = OTHER; note = 2'-O-methyl modified nucleotide
  modified_base 12: mod_base = OTHER; note = 2'-O-methyl modified nucleotide
  modified_base 13: mod_base = OTHER; note = 2'-O-methyl modified nucleotide
  modified_base 14: mod_base = OTHER; note = 2'-fluoro modified nucleotide
  modified_base 15: mod_base = OTHER; note = 2'-O-methyl modified nucleotide
  modified_base 16: mod_base = OTHER; note = 2'-fluoro modified nucleotide
  modified_base 17: mod_base = OTHER; note = 2'-O-methyl modified nucleotide
  modified_base 18: mod_base = OTHER; note = 2'-O-methyl modified nucleotide
  modified_base 19: mod_base = OTHER; note = 2'-O-methyl modified nucleotide with phosphorothioate linkage
  modified_base 20: mod_base = OTHER; note = 2'-O-methyl modified nucleotide with phosphorothioate linkage
  modified_base 21: mod_base = OTHER; note = 2'-O-methyl modified nucleotide
tatggtagaacagagttggac

SEQ ID NO: 1072 - RNA, 21 nt, synthetic construct
  source 1..21: mol_type = other RNA
  modified_base 1: mod_base = OTHER; note = Vinyl-phosphonate 2'-O-methyl modified nucleotide with phosphorothioate linkage
  modified_base 2: mod_base = OTHER; note = 2'-fluoro modified nucleotide with phosphorothioate linkage
  modified_base 3: mod_base = OTHER; note = 2'-O-methyl modified nucleotide
  modified_base 4: mod_base = OTHER; note = 2'-O-methyl modified nucleotide
  modified_base 5: mod_base = OTHER; note = 2'-O-methyl modified nucleotide
  modified_base 6: mod_base = OTHER; note = 2'-fluoro modified nucleotide
  modified_base 7: mod_base = OTHER; note = 2'-O-methyl modified nucleotide
  modified_base 8: mod_base = OTHER; note = 2'-O-methyl modified nucleotide
  modified_base 9: mod_base = OTHER; note = 2'-O-methyl modified nucleotide
  modified_base 10: mod_base = OTHER; note = 2'-O-methyl modified nucleotide
  modified_base 11: mod_base = OTHER; note = 2'-O-methyl modified nucleotide
  modified_base 12: mod_base = OTHER; note = 2'-O-methyl modified nucleotide
  modified_base 13: mod_base = OTHER; note = 2'-O-methyl modified nucleotide
  modified_base 14: mod_base = OTHER; note = 2'-fluoro modified nucleotide
  modified_base 15: mod_base = OTHER; note = 2'-O-methyl modified nucleotide
  modified_base 16: mod_base = OTHER; note = 2'-fluoro modified nucleotide
  modified_base 17: mod_base = OTHER; note = 2'-O-methyl modified nucleotide
  modified_base 18: mod_base = OTHER; note = 2'-O-methyl modified nucleotide
  modified_base 19: mod_base = OTHER; note = 2'-O-methyl modified nucleotide with phosphorothioate linkage
  modified_base 20: mod_base = OTHER; note = 2'-O-methyl modified nucleotide with phosphorothioate linkage
  modified_base 21: mod_base = OTHER; note = 2'-O-methyl modified nucleotide
tattttcaaatagcaccggaa

SEQ ID NO: 1073 - RNA, 21 nt, synthetic construct
  source 1..21: mol_type = other RNA
  modified_base 1: mod_base = OTHER; note = Vinyl-phosphonate 2'-O-methyl modified nucleotide with phosphorothioate linkage
  modified_base 2: mod_base = OTHER; note = 2'-fluoro modified nucleotide with phosphorothioate linkage
  modified_base 3: mod_base = OTHER; note = 2'-O-methyl modified nucleotide
  modified_base 4: mod_base = OTHER; note = 2'-O-methyl modified nucleotide
  modified_base 5: mod_base = OTHER; note = 2'-O-methyl modified nucleotide
  modified_base 6: mod_base = OTHER; note = 2'-fluoro modified nucleotide
  modified_base 7: mod_base = OTHER; note = 2'-O-methyl modified nucleotide
  modified_base 8: mod_base = OTHER; note = 2'-O-methyl modified nucleotide
  modified_base 9: mod_base = OTHER; note = 2'-O-methyl modified nucleotide
  modified_base 10: mod_base = OTHER; note = 2'-O-methyl modified nucleotide
  modified_base 11: mod_base = OTHER; note = 2'-O-methyl modified nucleotide
  modified_base 12: mod_base = OTHER; note = 2'-O-methyl modified nucleotide
  modified_base 13: mod_base = OTHER; note = 2'-O-methyl modified nucleotide
  modified_base 14: mod_base = OTHER; note = 2'-fluoro modified nucleotide
  modified_base 15: mod_base = OTHER; note = 2'-O-methyl modified nucleotide
  modified_base 16: mod_base = OTHER; note = 2'-fluoro modified nucleotide
  modified_base 17: mod_base = OTHER; note = 2'-O-methyl modified nucleotide
  modified_base 18: mod_base = OTHER; note = 2'-O-methyl modified nucleotide
  modified_base 19: mod_base = OTHER; note = 2'-O-methyl modified nucleotide with phosphorothioate linkage
  modified_base 20: mod_base = OTHER; note = 2'-O-methyl modified nucleotide with phosphorothioate linkage
  modified_base 21: mod_base = OTHER; note = 2'-O-methyl modified nucleotide
tatcacaatgctgaggttcat

SEQ ID NO: 1074 - RNA, 21 nt, synthetic construct
  source 1..21: mol_type = other RNA
  modified_base 1: mod_base = OTHER; note = Vinyl-phosphonate 2'-O-methyl modified nucleotide with phosphorothioate linkage
  modified_base 2: mod_base = OTHER; note = 2'-fluoro modified nucleotide with phosphorothioate linkage
  modified_base 3: mod_base = OTHER; note = 2'-O-methyl modified nucleotide
  modified_base 4: mod_base = OTHER; note = 2'-O-methyl modified nucleotide
  modified_base 5: mod_base = OTHER; note = 2'-O-methyl modified nucleotide
  modified_base 6: mod_base = OTHER; note = 2'-fluoro modified nucleotide
  modified_base 7: mod_base = OTHER; note = 2'-O-methyl modified nucleotide
  modified_base 8: mod_base = OTHER; note = 2'-O-methyl modified nucleotide
  modified_base 9: mod_base = OTHER; note = 2'-O-methyl modified nucleotide
  modified_base 10: mod_base = OTHER; note = 2'-O-methyl modified nucleotide
  modified_base 11: mod_base = OTHER; note = 2'-O-methyl modified nucleotide
  modified_base 12: mod_base = OTHER; note = 2'-O-methyl modified nucleotide
  modified_base 13: mod_base = OTHER; note = 2'-O-methyl modified nucleotide
  modified_base 14: mod_base = OTHER; note = 2'-fluoro modified nucleotide
  modified_base 15: mod_base = OTHER; note = 2'-O-methyl modified nucleotide
  modified_base 16: mod_base = OTHER; note = 2'-fluoro modified nucleotide
  modified_base 17: mod_base = OTHER; note = 2'-O-methyl modified nucleotide
  modified_base 18: mod_base = OTHER; note = 2'-O-methyl modified nucleotide
  modified_base 19: mod_base = OTHER; note = 2'-O-methyl modified nucleotide with phosphorothioate linkage
  modified_base 20: mod_base = OTHER; note = 2'-O-methyl modified nucleotide with phosphorothioate linkage
  modified_base 21: mod_base = OTHER; note = 2'-O-methyl modified nucleotide
tgtggtccaatgacttcaggt

SEQ ID NO: 1075 - RNA, 21 nt, synthetic construct
  source 1..21: mol_type = other RNA
  modified_base 1: mod_base = OTHER; note = Vinyl-phosphonate 2'-O-methyl modified nucleotide with phosphorothioate linkage
  modified_base 2: mod_base = OTHER; note = 2'-fluoro modified nucleotide with phosphorothioate linkage
  modified_base 3: mod_base = OTHER; note = 2'-O-methyl modified nucleotide
  modified_base 4: mod_base = OTHER; note = 2'-O-methyl modified nucleotide
  modified_base 5: mod_base = OTHER; note = 2'-O-methyl modified nucleotide
  modified_base 6: mod_base = OTHER; note = 2'-fluoro modified nucleotide
  modified_base 7: mod_base = OTHER; note = 2'-O-methyl modified nucleotide
  modified_base 8: mod_base = OTHER; note = 2'-O-methyl modified nucleotide
  modified_base 9: mod_base = OTHER; note = 2'-O-methyl modified nucleotide
  modified_base 10: mod_base = OTHER; note = 2'-O-methyl modified nucleotide
  modified_base 11: mod_base = OTHER; note = 2'-O-methyl modified nucleotide
  modified_base 12: mod_base = OTHER; note = 2'-O-methyl modified nucleotide
  modified_base 13: mod_base = OTHER; note = 2'-O-methyl modified nucleotide
  modified_base 14: mod_base = OTHER; note = 2'-fluoro modified nucleotide
  modified_base 15: mod_base = OTHER; note = 2'-O-methyl modified nucleotide
  modified_base 16: mod_base = OTHER; note = 2'-fluoro modified nucleotide
  modified_base 17: mod_base = OTHER; note = 2'-O-methyl modified nucleotide
  modified_base 18: mod_base = OTHER; note = 2'-O-methyl modified nucleotide
  modified_base 19: mod_base = OTHER; note = 2'-O-methyl modified nucleotide with phosphorothioate linkage
  modified_base 20: mod_base = OTHER; note = 2'-O-methyl modified nucleotide with phosphorothioate linkage
  modified_base 21: mod_base = OTHER; note = 2'-O-methyl modified nucleotide
tggtgcaaggaatgagaacca

SEQ ID NO: 1076 - RNA, 21 nt, synthetic construct
  source 1..21: mol_type = other RNA
  modified_base 1: mod_base = OTHER; note = Vinyl-phosphonate 2'-O-methyl modified nucleotide with phosphorothioate linkage
  modified_base 2: mod_base = OTHER; note = 2'-fluoro modified nucleotide with phosphorothioate linkage
  modified_base 3: mod_base = OTHER; note = 2'-O-methyl modified nucleotide
  modified_base 4: mod_base = OTHER; note = 2'-O-methyl modified nucleotide
  modified_base 5: mod_base = OTHER; note = 2'-O-methyl modified nucleotide
  modified_base 6: mod_base = OTHER; note = 2'-fluoro modified nucleotide
  modified_base 7: mod_base = OTHER; note = 2'-O-methyl modified nucleotide
  modified_base 8: mod_base = OTHER; note = 2'-O-methyl modified nucleotide
  modified_base 9: mod_base = OTHER; note = 2'-O-methyl modified nucleotide
  modified_base 10: mod_base = OTHER; note = 2'-O-methyl modified nucleotide
  modified_base 11: mod_base = OTHER; note = 2'-O-methyl modified nucleotide
  modified_base 12: mod_base = OTHER; note = 2'-O-methyl modified nucleotide
  modified_base 13: mod_base = OTHER; note = 2'-O-methyl modified nucleotide
  modified_base 14: mod_base = OTHER; note = 2'-fluoro modified nucleotide
  modified_base 15: mod_base = OTHER; note = 2'-O-methyl modified nucleotide
  modified_base 16: mod_base = OTHER; note = 2'-fluoro modified nucleotide
  modified_base 17: mod_base = OTHER; note = 2'-O-methyl modified nucleotide
  modified_base 18: mod_base = OTHER; note = 2'-O-methyl modified nucleotide
  modified_base 19: mod_base = OTHER; note = 2'-O-methyl modified nucleotide with phosphorothioate linkage
  modified_base 20: mod_base = OTHER; note = 2'-O-methyl modified nucleotide with phosphorothioate linkage
  modified_base 21: mod_base = OTHER; note = 2'-O-methyl modified nucleotide
ttggtgcaaggaatgagaacc

SEQ ID NO: 1077 - RNA, 21 nt, synthetic construct
  source 1..21: mol_type = other RNA
  modified_base 1: mod_base = OTHER; note = Vinyl-phosphonate 2'-O-methyl modified nucleotide with phosphorothioate linkage
  modified_base 2: mod_base = OTHER; note = 2'-fluoro modified nucleotide with phosphorothioate linkage
  modified_base 3: mod_base = OTHER; note = 2'-O-methyl modified nucleotide
  modified_base 4: mod_base = OTHER; note = 2'-O-methyl modified nucleotide
  modified_base 5: mod_base = OTHER; note = 2'-O-methyl modified nucleotide
  modified_base 6: mod_base = OTHER; note = 2'-fluoro modified nucleotide
  modified_base 7: mod_base = OTHER; note = 2'-O-methyl modified nucleotide
  modified_base 8: mod_base = OTHER; note = 2'-O-methyl modified nucleotide
  modified_base 9: mod_base = OTHER; note = 2'-O-methyl modified nucleotide
  modified_base 10: mod_base = OTHER; note = 2'-O-methyl modified nucleotide
  modified_base 11: mod_base = OTHER; note = 2'-O-methyl modified nucleotide
  modified_base 12: mod_base = OTHER; note = 2'-O-methyl modified nucleotide
  modified_base 13: mod_base = OTHER; note = 2'-O-methyl modified nucleotide
  modified_base 14: mod_base = OTHER; note = 2'-fluoro modified nucleotide
  modified_base 15: mod_base = OTHER; note = 2'-O-methyl modified nucleotide
  modified_base 16: mod_base = OTHER; note = 2'-fluoro modified nucleotide
  modified_base 17: mod_base = OTHER; note = 2'-O-methyl modified nucleotide
  modified_base 18: mod_base = OTHER; note = 2'-O-methyl modified nucleotide
  modified_base 19: mod_base = OTHER; note = 2'-O-methyl modified nucleotide with phosphorothioate linkage
  modified_base 20: mod_base = OTHER; note = 2'-O-methyl modified nucleotide with phosphorothioate linkage
  modified_base 21: mod_base = OTHER; note = 2'-O-methyl modified nucleotide
ttatggtgcaaggaatgagaa

SEQ ID NO: 1078 - RNA, 21 nt, synthetic construct
  source 1..21: mol_type = other RNA
  modified_base 1: mod_base = OTHER; note = Vinyl-phosphonate 2'-O-methyl modified nucleotide with phosphorothioate linkage
  modified_base 2: mod_base = OTHER; note = 2'-fluoro modified nucleotide with phosphorothioate linkage
  modified_base 3: mod_base = OTHER; note = 2'-O-methyl modified nucleotide
  modified_base 4: mod_base = OTHER; note = 2'-O-methyl modified nucleotide
  modified_base 5: mod_base = OTHER; note = 2'-O-methyl modified nucleotide
  modified_base 6: mod_base = OTHER; note = 2'-fluoro modified nucleotide
  modified_base 7: mod_base = OTHER; note = 2'-O-methyl modified nucleotide
  modified_base 8: mod_base = OTHER; note = 2'-O-methyl modified nucleotide
  modified_base 9: mod_base = OTHER; note = 2'-O-methyl modified nucleotide
  modified_base 10: mod_base = OTHER; note = 2'-O-methyl modified nucleotide
  modified_base 11: mod_base = OTHER; note = 2'-O-methyl modified nucleotide
  modified_base 12: mod_base = OTHER; note = 2'-O-methyl modified nucleotide
  modified_base 13: mod_base = OTHER; note = 2'-O-methyl modified nucleotide
  modified_base 14: mod_base = OTHER; note = 2'-fluoro modified nucleotide
  modified_base 15: mod_base = OTHER; note = 2'-O-methyl modified nucleotide
  modified_base 16: mod_base = OTHER; note = 2'-fluoro modified nucleotide
  modified_base 17: mod_base = OTHER; note = 2'-O-methyl modified nucleotide
  modified_base 18: mod_base = OTHER; note = 2'-O-methyl modified nucleotide
  modified_base 19: mod_base = OTHER; note = 2'-O-methyl modified nucleotide with phosphorothioate linkage
  modified_base 20: mod_base = OTHER; note = 2'-O-methyl modified nucleotide with phosphorothioate linkage
  modified_base 21: mod_base = OTHER; note = 2'-O-methyl modified nucleotide
tacgatccctatggtgcaagg

SEQ ID NO: 1079 - RNA, 21 nt, synthetic construct
  source 1..21: mol_type = other RNA
  modified_base 1: mod_base = OTHER; note = Vinyl-phosphonate 2'-O-methyl modified nucleotide with phosphorothioate linkage
  modified_base 2: mod_base = OTHER; note = 2'-fluoro modified nucleotide with phosphorothioate linkage
  modified_base 3: mod_base = OTHER; note = 2'-O-methyl modified nucleotide
  modified_base 4: mod_base = OTHER; note = 2'-O-methyl modified nucleotide
  modified_base 5: mod_base = OTHER; note = 2'-O-methyl modified nucleotide
  modified_base 6: mod_base = OTHER; note = 2'-fluoro modified nucleotide
  modified_base 7: mod_base = OTHER; note = 2'-O-methyl modified nucleotide
  modified_base 8: mod_base = OTHER; note = 2'-O-methyl modified nucleotide
  modified_base 9: mod_base = OTHER; note = 2'-O-methyl modified nucleotide
  modified_base 10: mod_base = OTHER; note = 2'-O-methyl modified nucleotide
  modified_base 11: mod_base = OTHER; note = 2'-O-methyl modified nucleotide
  modified_base 12: mod_base = OTHER; note = 2'-O-methyl modified nucleotide
  modified_base 13: mod_base = OTHER; note = 2'-O-methyl modified nucleotide
  modified_base 14: mod_base = OTHER; note = 2'-fluoro modified nucleotide
  modified_base 15: mod_base = OTHER; note = 2'-O-methyl modified nucleotide
  modified_base 16: mod_base = OTHER; note = 2'-fluoro modified nucleotide
  modified_base 17: mod_base = OTHER; note = 2'-O-methyl modified nucleotide
  modified_base 18: mod_base = OTHER; note = 2'-O-methyl modified nucleotide
  modified_base 19: mod_base = OTHER; note = 2'-O-methyl modified nucleotide with phosphorothioate linkage
  modified_base 20: mod_base = OTHER; note = 2'-O-methyl modified nucleotide with phosphorothioate linkage
  modified_base 21: mod_base = OTHER; note = 2'-O-methyl modified nucleotide
tgacgatccctatggtgcaag

SEQ ID NO: 1080 - RNA, 21 nt, synthetic construct
  source 1..21: mol_type = other RNA
  modified_base 1: mod_base = OTHER; note = Vinyl-phosphonate 2'-O-methyl modified nucleotide with phosphorothioate linkage
  modified_base 2: mod_base = OTHER; note = 2'-fluoro modified nucleotide with phosphorothioate linkage
  modified_base 3: mod_base = OTHER; note = 2'-O-methyl modified nucleotide
  modified_base 4: mod_base = OTHER; note = 2'-O-methyl modified nucleotide
  modified_base 5: mod_base = OTHER; note = 2'-O-methyl modified nucleotide
  modified_base 6: mod_base = OTHER; note = 2'-fluoro modified nucleotide
  modified_base 7: mod_base = OTHER; note = 2'-O-methyl modified nucleotide
  modified_base 8: mod_base = OTHER; note = 2'-O-methyl modified nucleotide
  modified_base 9: mod_base = OTHER; note = 2'-O-methyl modified nucleotide
  modified_base 10: mod_base = OTHER; note = 2'-O-methyl modified nucleotide
  modified_base 11: mod_base = OTHER; note = 2'-O-methyl modified nucleotide
  modified_base 12: mod_base = OTHER; note = 2'-O-methyl modified nucleotide
  modified_base 13: mod_base = OTHER; note = 2'-O-methyl modified nucleotide
  modified_base 14: mod_base = OTHER; note = 2'-fluoro modified nucleotide
  modified_base 15: mod_base = OTHER; note = 2'-O-methyl modified nucleotide
  modified_base 16: mod_base = OTHER; note = 2'-fluoro modified nucleotide
  modified_base 17: mod_base = OTHER; note = 2'-O-methyl modified nucleotide
  modified_base 18: mod_base = OTHER; note = 2'-O-methyl modified nucleotide
  modified_base 19: mod_base = OTHER; note = 2'-O-methyl modified nucleotide with phosphorothioate linkage
  modified_base 20: mod_base = OTHER; note = 2'-O-methyl modified nucleotide with phosphorothioate linkage
  modified_base 21: mod_base = OTHER; note = 2'-O-methyl modified nucleotide
tggaaaatcatgtagaggagg

SEQ ID NO: 1081 - RNA, 21 nt, synthetic construct
  source 1..21: mol_type = other RNA
  modified_base 1: mod_base = OTHER; note = Vinyl-phosphonate 2'-O-methyl modified nucleotide with phosphorothioate linkage
  modified_base 2: mod_base = OTHER; note = 2'-fluoro modified nucleotide with phosphorothioate linkage
  modified_base 3: mod_base = OTHER; note = 2'-O-methyl modified nucleotide
  modified_base 4: mod_base = OTHER; note = 2'-O-methyl modified nucleotide
  modified_base 5: mod_base = OTHER; note = 2'-O-methyl modified nucleotide
  modified_base 6: mod_base = OTHER; note = 2'-fluoro modified nucleotide
  modified_base 7: mod_base = OTHER; note = 2'-O-methyl modified nucleotide
  modified_base 8: mod_base = OTHER; note = 2'-O-methyl modified nucleotide
  modified_base 9: mod_base = OTHER; note = 2'-O-methyl modified nucleotide
  modified_base 10: mod_base = OTHER; note = 2'-O-methyl modified nucleotide
  modified_base 11: mod_base = OTHER; note = 2'-O-methyl modified nucleotide
  modified_base 12: mod_base = OTHER; note = 2'-O-methyl modified nucleotide
  modified_base 13: mod_base = OTHER; note = 2'-O-methyl modified nucleotide
  modified_base 14: mod_base = OTHER; note = 2'-fluoro modified nucleotide
  modified_base 15: mod_base = OTHER; note = 2'-O-methyl modified nucleotide
  modified_base 16: mod_base = OTHER; note = 2'-fluoro modified nucleotide
  modified_base 17: mod_base = OTHER; note = 2'-O-methyl modified nucleotide
  modified_base 18: mod_base = OTHER; note = 2'-O-methyl modified nucleotide
  modified_base 19: mod_base = OTHER; note = 2'-O-methyl modified nucleotide with phosphorothioate linkage
  modified_base 20: mod_base = OTHER; note = 2'-O-methyl modified nucleotide with phosphorothioate linkage
  modified_base 21: mod_base = OTHER; note = 2'-O-methyl modified nucleotide
tgctggaaaatcatgtagagg

SEQ ID NO: 1082 - RNA, 21 nt, synthetic construct
  source 1..21: mol_type = other RNA
  modified_base 1: mod_base = OTHER; note = Vinyl-phosphonate 2'-O-methyl modified nucleotide with phosphorothioate linkage
  modified_base 2: mod_base = OTHER; note = 2'-fluoro modified nucleotide with phosphorothioate linkage
  modified_base 3: mod_base = OTHER; note = 2'-O-methyl modified nucleotide
  modified_base 4: mod_base = OTHER; note = 2'-O-methyl modified nucleotide
  modified_base 5: mod_base = OTHER; note = 2'-O-methyl modified nucleotide
  modified_base 6: mod_base = OTHER; note = 2'-fluoro modified nucleotide
  modified_base 7: mod_base = OTHER; note = 2'-O-methyl modified nucleotide
  modified_base 8: mod_base = OTHER; note = 2'-O-methyl modified nucleotide
  modified_base 9: mod_base = OTHER; note = 2'-O-methyl modified nucleotide
  modified_base 10: mod_base = OTHER; note = 2'-O-methyl modified nucleotide
  modified_base 11: mod_base = OTHER; note = 2'-O-methyl modified nucleotide
  modified_base 12: mod_base = OTHER; note = 2'-O-methyl modified nucleotide
  modified_base 13: mod_base = OTHER; note = 2'-O-methyl modified nucleotide
  modified_base 14: mod_base = OTHER; note = 2'-fluoro modified nucleotide
  modified_base 15: mod_base = OTHER; note = 2'-O-methyl modified nucleotide
  modified_base 16: mod_base = OTHER; note = 2'-fluoro modified nucleotide
  modified_base 17: mod_base = OTHER; note = 2'-O-methyl modified nucleotide
  modified_base 18: mod_base = OTHER; note = 2'-O-methyl modified nucleotide
  modified_base 19: mod_base = OTHER; note = 2'-O-methyl modified nucleotide with phosphorothioate linkage
  modified_base 20: mod_base = OTHER; note = 2'-O-methyl modified nucleotide with phosphorothioate linkage
  modified_base 21: mod_base = OTHER; note = 2'-O-methyl modified nucleotide
tgaactccatggtgcagccca

SEQ ID NO: 1083 - RNA, 21 nt, synthetic construct
  source 1..21: mol_type = other RNA
  modified_base 1: mod_base = OTHER; note = Vinyl-phosphonate 2'-O-methyl modified nucleotide with phosphorothioate linkage
  modified_base 2: mod_base = OTHER; note = 2'-fluoro modified nucleotide with phosphorothioate linkage
  modified_base 3: mod_base = OTHER; note = 2'-O-methyl modified nucleotide
  modified_base 4: mod_base = OTHER; note = 2'-O-methyl modified nucleotide
  modified_base 5: mod_base = OTHER; note = 2'-O-methyl modified nucleotide
  modified_base 6: mod_base = OTHER; note = 2'-fluoro modified nucleotide
  modified_base 7: mod_base = OTHER; note = 2'-O-methyl modified nucleotide
  modified_base 8: mod_base = OTHER; note = 2'-O-methyl modified nucleotide
  modified_base 9: mod_base = OTHER; note = 2'-O-methyl modified nucleotide
  modified_base 10: mod_base = OTHER; note = 2'-O-methyl modified nucleotide
  modified_base 11: mod_base = OTHER; note = 2'-O-methyl modified nucleotide
  modified_base 12: mod_base = OTHER; note = 2'-O-methyl modified nucleotide
  modified_base 13: mod_base = OTHER; note = 2'-O-methyl modified nucleotide
  modified_base 14: mod_base = OTHER; note = 2'-fluoro modified nucleotide
  modified_base 15: mod_base = OTHER; note = 2'-O-methyl modified nucleotide
  modified_base 16: mod_base = OTHER; note = 2'-fluoro modified nucleotide
  modified_base 17: mod_base = OTHER; note = 2'-O-methyl modified nucleotide
  modified_base 18: mod_base = OTHER; note = 2'-O-methyl modified nucleotide
  modified_base 19: mod_base = OTHER; note = 2'-O-methyl modified nucleotide with phosphorothioate linkage
  modified_base 20: mod_base = OTHER; note = 2'-O-methyl modified nucleotide with phosphorothioate linkage
  modified_base 21: mod_base = OTHER; note = 2'-O-methyl modified nucleotide
tggtcatcacaatgctgaggt

SEQ ID NO: 1084 - RNA, 21 nt, synthetic construct
  source 1..21: mol_type = other RNA
  modified_base 1: mod_base = OTHER; note = Vinyl-phosphonate 2'-O-methyl modified nucleotide with phosphorothioate linkage
  modified_base 2: mod_base = OTHER; note = 2'-fluoro modified nucleotide with phosphorothioate linkage
  modified_base 3: mod_base = OTHER; note = 2'-O-methyl modified nucleotide
  modified_base 4: mod_base = OTHER; note = 2'-O-methyl modified nucleotide
  modified_base 5: mod_base = OTHER; note = 2'-O-methyl modified nucleotide
  modified_base 6: mod_base = OTHER; note = 2'-fluoro modified nucleotide
  modified_base 7: mod_base = OTHER; note = 2'-O-methyl modified nucleotide
  modified_base 8: mod_base = OTHER; note = 2'-O-methyl modified nucleotide
  modified_base 9: mod_base = OTHER; note = 2'-O-methyl modified nucleotide
  modified_base 10: mod_base = OTHER; note = 2'-O-methyl modified nucleotide
  modified_base 11: mod_base = OTHER; note = 2'-O-methyl modified nucleotide
  modified_base 12: mod_base = OTHER; note = 2'-O-methyl modified nucleotide
  modified_base 13: mod_base = OTHER; note = 2'-O-methyl modified nucleotide
  modified_base 14: mod_base = OTHER; note = 2'-fluoro modified nucleotide
  modified_base 15: mod_base = OTHER; note = 2'-O-methyl modified nucleotide
  modified_base 16: mod_base = OTHER; note = 2'-fluoro modified nucleotide
  modified_base 17: mod_base = OTHER; note = 2'-O-methyl modified nucleotide
  modified_base 18: mod_base = OTHER; note = 2'-O-methyl modified nucleotide
  modified_base 19: mod_base = OTHER; note = 2'-O-methyl modified nucleotide with phosphorothioate linkage
  modified_base 20: mod_base = OTHER; note = 2'-O-methyl modified nucleotide with phosphorothioate linkage
  modified_base 21: mod_base = OTHER; note = 2'-O-methyl modified nucleotide
tgtggtcatcacaatgctgag

SEQ ID NO: 1085 - RNA, 21 nt, synthetic construct
  source 1..21: mol_type = other RNA
  modified_base 1: mod_base = OTHER; note = Vinyl-phosphonate 2'-O-methyl modified nucleotide with phosphorothioate linkage
  modified_base 2: mod_base = OTHER; note = 2'-fluoro modified nucleotide with phosphorothioate linkage
  modified_base 3: mod_base = OTHER; note = 2'-O-methyl modified nucleotide
  modified_base 4: mod_base = OTHER; note = 2'-O-methyl modified nucleotide
  modified_base 5: mod_base = OTHER; note = 2'-O-methyl modified nucleotide
  modified_base 6: mod_base = OTHER; note = 2'-fluoro modified nucleotide
  modified_base 7: mod_base = OTHER; note = 2'-O-methyl modified nucleotide
  modified_base 8: mod_base = OTHER; note = 2'-O-methyl modified nucleotide
  modified_base 9: mod_base = OTHER; note = 2'-O-methyl modified nucleotide
  modified_base 10: mod_base = OTHER; note = 2'-O-methyl modified nucleotide
  modified_base 11: mod_base = OTHER; note = 2'-O-methyl modified nucleotide
  modified_base 12: mod_base = OTHER; note = 2'-O-methyl modified nucleotide
  modified_base 13: mod_base = OTHER; note = 2'-O-methyl modified nucleotide
  modified_base 14: mod_base = OTHER; note = 2'-fluoro modified nucleotide
  modified_base 15: mod_base = OTHER; note = 2'-O-methyl modified nucleotide
  modified_base 16: mod_base = OTHER; note = 2'-fluoro modified nucleotide
  modified_base 17: mod_base = OTHER; note = 2'-O-methyl modified nucleotide
  modified_base 18: mod_base = OTHER; note = 2'-O-methyl modified nucleotide
  modified_base 19: mod_base = OTHER; note = 2'-O-methyl modified nucleotide with phosphorothioate linkage
  modified_base 20: mod_base = OTHER; note = 2'-O-methyl modified nucleotide with phosphorothioate linkage
  modified_base 21: mod_base = OTHER; note = 2'-O-methyl modified nucleotide
tctatggtgcaaggaatgaga

SEQ ID NO: 1086 - RNA, 21 nt, synthetic construct
  source 1..21: mol_type = other RNA
  modified_base 1: mod_base = OTHER; note = Vinyl-phosphonate 2'-O-methyl modified nucleotide with phosphorothioate linkage
  modified_base 2: mod_base = OTHER; note = 2'-fluoro modified nucleotide with phosphorothioate linkage
  modified_base 3: mod_base = OTHER; note = 2'-O-methyl modified nucleotide
  modified_base 4: mod_base = OTHER; note = 2'-O-methyl modified nucleotide
  modified_base 5: mod_base = OTHER; note = 2'-O-methyl modified nucleotide
  modified_base 6: mod_base = OTHER; note = 2'-fluoro modified nucleotide
  modified_base 7: mod_base = OTHER; note = 2'-O-methyl modified nucleotide
  modified_base 8: mod_base = OTHER; note = 2'-O-methyl modified nucleotide
  modified_base 9: mod_base = OTHER; note = 2'-O-methyl modified nucleotide
  modified_base 10: mod_base = OTHER; note = 2'-O-methyl modified nucleotide
  modified_base 11: mod_base = OTHER; note = 2'-O-methyl modified nucleotide
  modified_base 12: mod_base = OTHER; note = 2'-O-methyl modified nucleotide
  modified_base 13: mod_base = OTHER; note = 2'-O-methyl modified nucleotide
  modified_base 14: mod_base = OTHER; note = 2'-fluoro modified nucleotide
  modified_base 15: mod_base = OTHER; note = 2'-O-methyl modified nucleotide
  modified_base 16: mod_base = OTHER; note = 2'-fluoro modified nucleotide
  modified_base 17: mod_base = OTHER; note = 2'-O-methyl modified nucleotide
  modified_base 18: mod_base = OTHER; note = 2'-O-methyl modified nucleotide
  modified_base 19: mod_base = OTHER; note = 2'-O-methyl modified nucleotide with phosphorothioate linkage
  modified_base 20: mod_base = OTHER; note = 2'-O-methyl modified nucleotide with phosphorothioate linkage
  modified_base 21: mod_base = OTHER; note = 2'-O-methyl modified nucleotide
tcctatggtgcaaggaatgag

SEQ ID NO: 1087 - RNA, 21 nt, synthetic construct
  source 1..21: mol_type = other RNA
  modified_base 1: mod_base = OTHER; note = Vinyl-phosphonate 2'-O-methyl modified nucleotide with phosphorothioate linkage
  modified_base 2: mod_base = OTHER; note = 2'-fluoro modified nucleotide with phosphorothioate linkage
  modified_base 3: mod_base = OTHER; note = 2'-O-methyl modified nucleotide
  modified_base 4: mod_base = OTHER; note = 2'-O-methyl modified nucleotide
  modified_base 5: mod_base = OTHER; note = 2'-O-methyl modified nucleotide
  modified_base 6: mod_base = OTHER; note = 2'-fluoro modified nucleotide
  modified_base 7: mod_base = OTHER; note = 2'-O-methyl modified nucleotide
  modified_base 8: mod_base = OTHER; note = 2'-O-methyl modified nucleotide
  modified_base 9: mod_base = OTHER; note = 2'-O-methyl modified nucleotide
  modified_base 10: mod_base = OTHER; note = 2'-O-methyl modified nucleotide
  modified_base 11: mod_base = OTHER; note = 2'-O-methyl modified nucleotide
  modified_base 12: mod_base = OTHER; note = 2'-O-methyl modified nucleotide
  modified_base 13: mod_base = OTHER; note = 2'-O-methyl modified nucleotide
  modified_base 14: mod_base = OTHER; note = 2'-fluoro modified nucleotide
  modified_base 15: mod_base = OTHER; note = 2'-O-methyl modified nucleotide
  modified_base 16: mod_base = OTHER; note = 2'-fluoro modified nucleotide
  modified_base 17: mod_base = OTHER; note = 2'-O-methyl modified nucleotide
  modified_base 18: mod_base = OTHER; note = 2'-O-methyl modified nucleotide
  modified_base 19: mod_base = OTHER; note = 2'-O-methyl modified nucleotide with phosphorothioate linkage
  modified_base 20: mod_base = OTHER; note = 2'-O-methyl modified nucleotide with phosphorothioate linkage
  modified_base 21: mod_base = OTHER; note = 2'-O-methyl modified nucleotide
tccctatggtgcaaggaatga

SEQ ID NO: 1088 - RNA, 21 nt, synthetic construct
  source 1..21: mol_type = other RNA
  modified_base 1: mod_base = OTHER; note = Vinyl-phosphonate 2'-O-methyl modified nucleotide with phosphorothioate linkage
  modified_base 2: mod_base = OTHER; note = 2'-fluoro modified nucleotide with phosphorothioate linkage
  modified_base 3: mod_base = OTHER; note = 2'-O-methyl modified nucleotide
  modified_base 4: mod_base = OTHER; note = 2'-O-methyl modified nucleotide
  modified_base 5: mod_base = OTHER; note = 2'-O-methyl modified nucleotide
  modified_base 6: mod_base = OTHER; note = 2'-fluoro modified nucleotide
  modified_base 7: mod_base = OTHER; note = 2'-O-methyl modified nucleotide
  modified_base 8: mod_base = OTHER; note = 2'-O-methyl modified nucleotide
  modified_base 9: mod_base = OTHER; note = 2'-O-methyl modified nucleotide
  modified_base 10: mod_base = OTHER; note = 2'-O-methyl modified nucleotide
  modified_base 11: mod_base = OTHER; note = 2'-O-methyl modified nucleotide
  modified_base 12: mod_base = OTHER; note = 2'-O-methyl modified nucleotide
  modified_base 13: mod_base = OTHER; note = 2'-O-methyl modified nucleotide
  modified_base 14: mod_base = OTHER; note = 2'-fluoro modified nucleotide
  modified_base 15: mod_base = OTHER; note = 2'-O-methyl modified nucleotide
  modified_base 16: mod_base = OTHER; note = 2'-fluoro modified nucleotide
  modified_base 17: mod_base = OTHER; note = 2'-O-methyl modified nucleotide
  modified_base 18: mod_base = OTHER; note = 2'-O-methyl modified nucleotide
  modified_base 19: mod_base = OTHER; note = 2'-O-methyl modified nucleotide with phosphorothioate linkage
  modified_base 20: mod_base = OTHER; note = 2'-O-methyl modified nucleotide with phosphorothioate linkage
  modified_base 21: mod_base = OTHER; note = 2'-O-methyl modified nucleotide
tgatccctatggtgcaaggaa

SEQ ID NO: 1089 - RNA, 21 nt, synthetic construct
  source 1..21: mol_type = other RNA
  modified_base 1: mod_base = OTHER; note = Vinyl-phosphonate 2'-O-methyl modified nucleotide with phosphorothioate linkage
  modified_base 2: mod_base = OTHER; note = 2'-fluoro modified nucleotide with phosphorothioate linkage
  modified_base 3: mod_base = OTHER; note = 2'-O-methyl modified nucleotide
  modified_base 4: mod_base = OTHER; note = 2'-O-methyl modified nucleotide
  modified_base 5: mod_base = OTHER; note = 2'-O-methyl modified nucleotide
  modified_base 6: mod_base = OTHER; note = 2'-fluoro modified nucleotide
  modified_base 7: mod_base = OTHER; note = 2'-O-methyl modified nucleotide
  modified_base 8: mod_base = OTHER; note = 2'-O-methyl modified nucleotide
  modified_base 9: mod_base = OTHER; note = 2'-O-methyl modified nucleotide
  modified_base 10: mod_base = OTHER; note = 2'-O-methyl modified nucleotide
  modified_base 11: mod_base = OTHER; note = 2'-O-methyl modified nucleotide
  modified_base 12: mod_base = OTHER; note = 2'-O-methyl modified nucleotide
  modified_base 13: mod_base = OTHER; note = 2'-O-methyl modified nucleotide
  modified_base 14: mod_base = OTHER; note = 2'-fluoro modified nucleotide
  modified_base 15: mod_base = OTHER; note = 2'-O-methyl modified nucleotide
  modified_base 16: mod_base = OTHER; note = 2'-fluoro modified nucleotide
  modified_base 17: mod_base = OTHER; note = 2'-O-methyl modified nucleotide
  modified_base 18: mod_base = OTHER; note = 2'-O-methyl modified nucleotide
  modified_base 19: mod_base = OTHER; note = 2'-O-methyl modified nucleotide with phosphorothioate linkage
  modified_base 20: mod_base = OTHER; note = 2'-O-methyl modified nucleotide with phosphorothioate linkage
  modified_base 21: mod_base = OTHER; note = 2'-O-methyl modified nucleotide
tcgatccctatggtgcaagga

SEQ ID NO: 1090 - RNA, 21 nt, synthetic construct
  source 1..21: mol_type = other RNA
  modified_base 1: mod_base = OTHER; note = Vinyl-phosphonate 2'-O-methyl modified nucleotide with phosphorothioate linkage
  modified_base 2: mod_base = OTHER; note = 2'-fluoro modified nucleotide with phosphorothioate linkage
  modified_base 3: mod_base = OTHER; note = 2'-O-methyl modified nucleotide
  modified_base 4: mod_base = OTHER; note = 2'-O-methyl modified nucleotide
  modified_base 5: mod_base = OTHER; note = 2'-O-methyl modified nucleotide
  modified_base 6: mod_base = OTHER; note = 2'-fluoro modified nucleotide
  modified_base 7: mod_base = OTHER; note = 2'-O-methyl modified nucleotide
  modified_base 8: mod_base = OTHER; note = 2'-O-methyl modified nucleotide
  modified_base 9: mod_base = OTHER; note = 2'-O-methyl modified nucleotide
  modified_base 10: mod_base = OTHER; note = 2'-O-methyl modified nucleotide
  modified_base 11: mod_base = OTHER; note = 2'-O-methyl modified nucleotide
  modified_base 12: mod_base = OTHER; note = 2'-O-methyl modified nucleotide
  modified_base 13: mod_base = OTHER; note = 2'-O-methyl modified nucleotide
  modified_base 14: mod_base = OTHER; note = 2'-fluoro modified nucleotide
  modified_base 15: mod_base = OTHER; note = 2'-O-methyl modified nucleotide
  modified_base 16: mod_base = OTHER; note = 2'-fluoro modified nucleotide
  modified_base 17: mod_base = OTHER; note = 2'-O-methyl modified nucleotide
  modified_base 18: mod_base = OTHER; note = 2'-O-methyl modified nucleotide
  modified_base 19: mod_base = OTHER; note = 2'-O-methyl modified nucleotide with phosphorothioate linkage
  modified_base 20: mod_base = OTHER; note = 2'-O-methyl modified nucleotide with phosphorothioate linkage
  modified_base 21: mod_base = OTHER; note = 2'-O-methyl modified nucleotide
tggacgatccctatggtgcaa

SEQ ID NO: 1091 - RNA, 21 nt, synthetic construct
  source 1..21: mol_type = other RNA
  modified_base 1: mod_base = OTHER; note = Vinyl-phosphonate 2'-O-methyl modified nucleotide with phosphorothioate linkage
  modified_base 2: mod_base = OTHER; note = 2'-fluoro modified nucleotide with phosphorothioate linkage
  modified_base 3: mod_base = OTHER; note = 2'-O-methyl modified nucleotide
  modified_base 4: mod_base = OTHER; note = 2'-O-methyl modified nucleotide
  modified_base 5: mod_base = OTHER; note = 2'-O-methyl modified nucleotide
  modified_base 6: mod_base = OTHER; note = 2'-fluoro modified nucleotide
  modified_base 7: mod_base = OTHER; note = 2'-O-methyl modified nucleotide
  modified_base 8: mod_base = OTHER; note = 2'-O-methyl modified nucleotide
  modified_base 9: mod_base = OTHER; note = 2'-O-methyl modified nucleotide
  modified_base 10: mod_base = OTHER; note = 2'-O-methyl modified nucleotide
  modified_base 11: mod_base = OTHER; note = 2'-O-methyl modified nucleotide
  modified_base 12: mod_base = OTHER; note = 2'-O-methyl modified nucleotide
  modified_base 13: mod_base = OTHER; note = 2'-O-methyl modified nucleotide
  modified_base 14: mod_base = OTHER; note = 2'-fluoro modified nucleotide
  modified_base 15: mod_base = OTHER; note = 2'-O-methyl modified nucleotide
  modified_base 16: mod_base = OTHER; note = 2'-fluoro modified nucleotide
  modified_base 17: mod_base = OTHER; note = 2'-O-methyl modified nucleotide
  modified_base 18: mod_base = OTHER; note = 2'-O-methyl modified nucleotide
  modified_base 19: mod_base = OTHER; note = 2'-O-methyl modified nucleotide with phosphorothioate linkage
  modified_base 20: mod_base = OTHER; note = 2'-O-methyl modified nucleotide with phosphorothioate linkage
  modified_base 21: mod_base = OTHER; note = 2'-O-methyl modified nucleotide
taggacgatccctatggtgca

SEQ ID NO: 1092 - RNA, 21 nt, synthetic construct
  source 1..21: mol_type = other RNA
  modified_base 1: mod_base = OTHER; note = Vinyl-phosphonate 2'-O-methyl modified nucleotide with phosphorothioate linkage
  modified_base 2: mod_base = OTHER; note = 2'-fluoro modified nucleotide with phosphorothioate linkage
  modified_base 3: mod_base = OTHER; note = 2'-O-methyl modified nucleotide
  modified_base 4: mod_base = OTHER; note = 2'-O-methyl modified nucleotide
  modified_base 5: mod_base = OTHER; note = 2'-O-methyl modified nucleotide
  modified_base 6: mod_base = OTHER; note = 2'-fluoro modified nucleotide
  modified_base 7: mod_base = OTHER; note = 2'-O-methyl modified nucleotide
  modified_base 8: mod_base = OTHER; note = 2'-O-methyl modified nucleotide
  modified_base 9: mod_base = OTHER; note = 2'-O-methyl modified nucleotide
  modified_base 10: mod_base = OTHER; note = 2'-O-methyl modified nucleotide
  modified_base 11: mod_base = OTHER; note = 2'-O-methyl modified nucleotide
  modified_base 12: mod_base = OTHER; note = 2'-O-methyl modified nucleotide
  modified_base 13: mod_base = OTHER; note = 2'-O-methyl modified nucleotide
  modified_base 14: mod_base = OTHER; note = 2'-fluoro modified nucleotide
  modified_base 15: mod_base = OTHER; note = 2'-O-methyl modified nucleotide
  modified_base 16: mod_base = OTHER; note = 2'-fluoro modified nucleotide
  modified_base 17: mod_base = OTHER; note = 2'-O-methyl modified nucleotide
  modified_base 18: mod_base = OTHER; note = 2'-O-methyl modified nucleotide
  modified_base 19: mod_base = OTHER; note = 2'-O-methyl modified nucleotide with phosphorothioate linkage
  modified_base 20: mod_base = OTHER; note = 2'-O-methyl modified nucleotide with phosphorothioate linkage
  modified_base 21: mod_base = OTHER; note = 2'-O-methyl modified nucleotide
tgaggacgatccctatggtgc

SEQ ID NO: 1093 - DNA, 2002 bp, Homo sapiens
  source 1..2002: mol_type = genomic DNA
gattaaagaaggcatccagcaagaactgcacaagaaacggagtcagccggagaacaaggagtggtcttccactgcctcacaggaggatggaggcccacaacgcgtctgccccattcaacttcaccctgccacccaactttggcaagcgccccacagacctggcactgagcgtcatcctggtgttcatgttgttcttcatcatgctctcgctgggctgcaccatggagttcagcaagatcaaggctcacttatggaagcctaaagggctggccatcgccctggtggcacagtatggcatcatgcccctcacggcctttgtgctgggcaaggtcttccggctgaagaacattgaggcactggccatcttggtctgtggctgctcacctggagggaacctgtccaatgtcttcagtctggccatgaagggggacatgaacctcagcattgtgatgaccacctgctccaccttctgtgcccttggcatgatgcctctcctcctgtacatctactccagggggatctatgatggggacctgaaggacaaggtgccctataaaggcatcgtgatatcactggtcctggttctcattccttgcaccatagggatcgtcctcaaatccaaacggccacaatacatgcgctatgtcatcaagggagggatgatcatcattctcttgtgcagtgtggccgtcacagttctctctgccatcaatgtggggaagagcatcatgtttgccatgacaccactcttgattgccacctcctccctgatgccttttattggctttctgctgggttatgttctctctgctctcttctgcctcaatggacggtgcagacgcactgtcagcatggagactggatgccaaaatgtccaactctgttccaccatcctcaatgtggcctttccacctgaagtcattggaccacttttcttctttcccctcctctacatgattttccagcttggagaagggcttctcctcattgccatattttggtgctatgagaaattcaagactcccaaggataaaacaaaaatgatctacacagctgccacaactgaagaaacaattccaggagctctgggaaatggcacctacaaaggggaggactgctccccttgcacagcctagcccttcccctggtggcctggattctggtcccaaagcaattctgaaagccagtgtggtaaactagagagagcagcaaaaacaccagtcttgcctgagtctttctccagcatttccagtacatctatcagaatcatcaagtcttggccgggaacacagacagggtgtctacccaagaagcctcacctatccccaacttagaatttgctacttattttaaagacttgttcagtgactgtaaactctatgaaaccagaaaccgaatctgcctcttgctgggatctctaaaagtgtctgataagcatcttaaagtcactcaattcctgaactaatcaatatatatgtttaacccattactcaaatacccaaatcccattccaagttttgtgacccaaaagagaaataaatgctcacaagtgctgtagaattaaacttcagaagttctaacctaaaaagttcagatcctattccttcccttttgacattattgggatgatgctcccgaaaagtcaaatttgacatcaagtatgcaaaagtgaacacagtaagatgcaatcaggcaaaacaaactcaaaaaatagctaatgaaatgaaaaaactgggcgaatgcatcatgttagtagaggaggaaaacttttgacaaggaaaaaccaggaaacaaacacatacattaacacaatgttacctcactaataatctcttttttaagttcagtaggtatttggttttaacacaaggcgcccccaaaactgggtacagcaaactactgccaaaatgagtcgtttcccaattcaaagaaaaatgttcaaatacctagaattcacaaatttcaaattgtctctaataaaatttaaacattttgcatatca

1. A small interfering RNA (siRNA) molecule targeting a SLC10A1 mRNA transcript, comprising a double-stranded region of 17- to 30-base pairs in length that is formed between the complementary base pairs of a sense strand sequence and an antisense strand sequence, wherein the siRNA comprises a sense strand sequence selected from the group consisting of SEQ ID Nos. 1-15, 31-45 and 481-611, and/or an antisense strand sequence selected from the group consisting of SEQ ID Nos. 16-30, 46-60 and 612-742.

2. (canceled)

3. The siRNA molecule of claim 1, wherein the sequence of the siRNA molecule has 100% complementary, or a mismatch of 4 base pairs or fewer to a portion of the sequence of the SLC10A1 mRNA transcript.

4.-5. (canceled)

6. The siRNA molecule of claim 1, wherein the siRNA molecule targets a human SLC10A1 mRNA transcript.

7.-9. (canceled)

10. The siRNA molecule of claim 1, wherein the siRNA molecule comprises at least one overhang, each overhang having up to six or fewer nucleotides.

11.-16. (canceled)

17. The siRNA molecule of claim 1, wherein the siRNA comprises one or more chemical modifications, and wherein the one or more chemical modifications is 2′-O-methyl modification, 2′-fluoro modification, introduction of phosphorothioate modified nucleotides, substitution of uracil with 5-Propynyluracil, substitution of uracil with 5′-methyluridine, substitution of uracil ribose nucleotides with 4′-thioribose and substitution of uracil ribose nucleotides with deoxythymidine nucleotides, or any combinations thereof.

18.-21. (canceled)

22. The siRNA molecule of claim 17, wherein the chemical modifications include at least one 2′-O-methyl modification and/or at least one 2′-fluoro modification.

23.-24. (canceled)

25. The siRNA molecule of claim 1, wherein the siRNA is conjugated to at least one N-acetylgalactosamine (GalNAc) moiety or derivative thereof.

26. (canceled)

27. The siRNA molecule of claim 25, wherein the GalNAc moiety is conjugated to the 3′ end of the sense strand.

28.-29. (canceled)

30. The siRNA molecule of claim 17, wherein the siRNA comprises a sense strand sequence selected from the group consisting of SEQ ID Nos. 61-270 and 743-873, and/or an antisense strand sequence selected from the group consisting of SEQ ID Nos. 271-480 and 874-1004.

31. The siRNA molecule of claim 30, comprising a pair of sense and antisense strand sequences selected from the group consisting of the pairs of SEQ ID NOs. 95 and 305; SEQ ID NOs. 110 and 320; SEQ ID NOs. 121 and 331; SEQ ID NOs. 125 and 335; SEQ ID NOs. 143 and 353; SEQ ID NOs. 181 and 391; SEQ ID NOs. 200 and 410; SEQ ID NOs. 215 and 425.

32. A pharmaceutical composition comprising the siRNA molecule according to claim 1, and a pharmaceutically acceptable excipient or carrier.

33.-34. (canceled)

35. A method of treating a cholestatic disorder in a patient in need thereof comprising administering to the patient a siRNA molecule targeting a human SLC10A1 mRNA transcript, comprising a pair of a sense strand sequence and an antisense strand sequence, wherein the siRNA comprises a sense strand sequence selected from the group consisting of SEQ ID Nos. 1-15, 31-45, 61-270, 481-611, and 743-873, and/or an antisense strand sequence selected from the group consisting of SEQ ID Nos. 16-30, 46-60 271-480, 612-742, and 874-1004.

36. The method of claim 35, wherein the cholestatic disorder is progressive intrahepatic familial cholestasis (PFIC), Alagille syndrome (ALGS), biliary atresia (BA), primary biliary cholangitis (PBC), primary sclerosing cholangitis (PSC), or intrahepatic cholestasis of pregnancy (ICP), or cholestasis caused by another disease or procedure, such as cholestasis after liver transplantation or cholestasis from a malignant biliary obstruction.

37. (canceled)

38. A method of treating in a patient in need comprising administering to the patient the siRNA molecule of claim 1, wherein the patient has liver damage, including inflammation, fibrosis, cirrhosis, liver failure, and hepatocellular carcinoma.

39.-42. (canceled)

43. A method of treating a disease that is associated with bile acid transporter, sodium taurocholate co-transporting polypeptide (NTCP), comprising silencing or reducing expression of a human SLC10A1 mRNA transcript with the siRNA molecule of claim 1.

44. The method of claim 43, wherein the disease is a cholestatic disorder, hepatitis B, hepatitis D, MASLD, MASH, MetALD (also known as NAFLD or NASH), diabetes, obesity, dyslipidemia, inflammatory bowel disease, or constipation inflammatory bowel disease (IBD).

45.-48. (canceled)

49. A method for reducing expression of a SLC10A1 mRNA transcript in a cell comprising administering the siRNA of claim 1.

50.-51. (canceled)

52. The siRNA molecule of claim 1 comprising a pair of a modified sense strand sequence and a modified anti-sense strand sequence listed in Table 3, Table 5 and Table 6.

53.-56. (canceled)

57. A method of treating a viral hepatitis B and/or hepatitis D disease in a subject using a siRNA targeting a human SLC10A1 mRNA transcript, comprising a pair of a sense strand sequence and an antisense strand sequence as a monotherapy or in a regimen combination with one or more antiviral agents, wherein the siRNA comprises a sense strand sequence selected from the group consisting of SEQ ID Nos. 1-15, 31-45, 61-270, 481-611, and 743-873, and/or an antisense strand sequence selected from the group consisting of SEQ ID Nos. 16-30, 46-60 271-480, 612-742, and 874-1004.

58.-70. (canceled)

71. The siRNA molecule of claim 31, comprising a sense strand sequence of SEQ ID NO. 110 and an antisense strand sequence of SEQ ID NO. 320, and wherein the siRNA comprises at least one GalNAc moiety or derivative thereof.

72.-77. (canceled)
